(19) United States
(12) Patent Application Publication
(10) Pub. No.: US 2005/0166269 A1
(43) Pub. Date: Jul. 28, 2005

(54) Sleep genes in Drosophila and their use for the screening, diagnosis and therapy of sleep disorders

(76) Inventors: Giulio Tononi, Verona, WI (US); Chiara Cirelli, Verona, WI (US)

Correspondence Address: Steven L. Highlander;Fulbright & Jaworski L.L.P., 600 Congress Avenue, Suite 2400, Austin, TX, 78701, US

(21) Appl. No.: 11/013,314

(22) Filed: Dec. 15, 2004

Related U.S. Application Data
(60) Provisional application No. 60/529,536, filed on Dec. 15, 2003.
(60) Provisional application No. 60/563,858, filed on Apr. 20, 2004.

(51) Int. Cl. A01K 67/033

(52) U.S. Cl. 800/3; 435/4; 800/8

(57) ABSTRACT

Methods of screening for a sleep altering compositions are disclosed as are the identities of various gene products that are involved in sleep function/dysfunction. Also described are methods for modifying the need for sleep and the response to sleep deprivation in subjects.

[0001] This application claims benefit of priority to U.S. Provisional Application Ser. No. 60/529,536, filed Dec. 15, 2003 and U.S. Provisional Application Ser. No. 60/563,858, filed Apr. 20, 2004, the entire contents of which are hereby incorporated by reference.

[0002] This invention was made with United States government support awarded by the following agencies: the Department of the Army and MRMC (DAAD 19-02-1-0036). The United States has certain rights in this invention.

### BACKGROUND OF THE INVENTION

[0003] 1. Field of the Invention

[0004] The present invention relates generally to the fields of molecular biology, cell biology, and pharmacology. More particularly, it concerns the identification of sleep-related genes in Drosophila, and methods of screening for sleep-altering compositions that affect the expression or activity of these genes. The present invention also pertains to methods of modifying the need for sleep and the response to sleep deprivation, as well as methods of identifying the basis of a sleep disorder in a subject.

[0005] 2. Description of Related Art

[0006] Sleep is a state of reduced consciousness in which the brain is relatively more responsive to internal than to external stimuli. Normal sleep is divided into non-rapid eye movement (NREM) and rapid eye movement (REM) sleep. In humans, the stages of sleep are stage I (light sleep), stage II, stages III and IV (deep or delta-wave sleep), and REM sleep. NREM sleep comprises stages I-IV.

[0007] The most prominent effect of total sleep deprivation in humans is cognitive impairment, with striking practical consequences. Each year, errors due to sleep deprivation and sleepiness cause 25,000 deaths, 2.5 millions of disabling injuries, and cost over $56,000,000,000 in the U.S. alone (National Commission on Sleep Disorders Research, 1994). Moreover, the National Highway Traffic Safety Administration estimates conservatively that each year drowsy driving is responsible for at least 100,000 automobile crashes, 71,000 injuries, and 1,550 fatalities (National Sleep Foundation, 2002). A sleep-deprived person tends to take longer to respond to stimuli, particularly when tasks are monotonous and low in cognitive demands. However, sleep deprivation produces more than just decreased alertness. Tasks emphasizing higher cognitive functions, such as logical reasoning, encoding, decoding and parsing complex sentences, complex subtraction tasks and tasks requiring divergent thinking, such as those involving a flexible thinking style and the ability to focus on a large number of goals simultaneously, are all significantly affected even after one single night of sleep deprivation. Tasks requiring sustained attention, such as those including goal-directed activities, can also be impaired by even a few hours of sleep loss.

[0008] NREM sleep is controlled by complex initiating and maintenance mechanisms, the extent of which is not fully known (reviewed in Saper et al., 2001; Belenky et al., 2003; Pace-Schott and Hobson, 2002). Probably no single sleep generating center exists. A more likely mechanism is sleep-generating circuits with inputs from the brainstem and hypothalamic neuronal groups. REM sleep is generated by mesencepthalic and pontine cholinergic neurons. It is characterized by muscle atonia, cortical activation, low-voltage desynchronization of the EEG, and rapid eye movements. REM has both tonic and phasic characteristics. Tonic muscle atonia is present throughout REM sleep. It results from inhibition of alpha motor neurons by clusters of peri-locus ceruleus neurons, which are referred to collectively as the dorsolateral small cell reticular group.

[0009] As the function of sleep has not been fully determined, the absolute number of hours necessary to fulfill its function in humans is still unknown. Some individuals claim full effectiveness with only 3-5 hours of sleep per night, while some admit needing at least 8 hours of sleep per night or more to perform effectively. Sleep deprivation is best defined by group means and in terms of the tasks impaired.

[0010] With decreased sleep, higher-order cognitive tasks are affected early and disproportionately (Belenky et al., 2003; Van Dongen et al., 2003). Tests requiring both speed and accuracy demonstrate considerably slowed speed before accuracy begins to fail. Total sleep duration of 7 hours per night over 1 week has resulted in decreased speed in tasks of both simple reaction time and more demanding computer-generated mathematical problem solving. Total sleep duration of 5 hours per night over 1 week shows both decrease in speed and the beginning of accuracy failure. Total sleep duration of 7 hours per night over 1 week leads to impairment of cognitive work requiring simultaneous focus on several tasks.

[0011] Sleep loss causes attention deficits, decrease in short-term memory, speech impediments, perseveration and inflexible thinking. These deficits can explain why sleep deprived subjects underestimate the severity of their cognitive impairment, often with tragic consequences. Another reason is the fact that the lack of sleep does not completely eliminate the capacity to perform, but rather makes the performance inconsistent and unreliable. Thus, a sleepy driver will either respond normally to an emergency or not at all, due to rapid changes in vigilance state and the sudden intrusion of “microsleeps,” defined as brief runs of theta or delta activities that break through the otherwise beta or alpha EEG of waking, during waking. Similarly, subjects may still be able to transiently perform at baseline levels in short tests even after 3-4 days of sleep deprivation. However, the same subjects will perform very poorly when engaged in tasks requiring sustained attention. New evidence suggests that not just a few hours of sleep, but several days of normal sleep/waking patterns are required to normalize cognitive performance after sleep deprivation.

[0012] Sleep deprivation is a relative concept. Small amounts of sleep loss (e.g., 1 hour per night over many nights) have subtle cognitive costs, which appear to go unrecognized by the individual experiencing the sleep loss (Belenky et al., 2003; Van Dongen et al., 2003). More severe restriction of sleep for a week leads to profound cognitive deficits similar to those seen in some stroke patients, which also appear to go unrecognized by the individual. The lack of recognition of the effects of sleep deprivation are not uncommon.

[0013] Chronic disease is also associated with sleep disorders. For example, problems like stroke and asthma attacks tend to occur more frequently during the night and early morning, perhaps due to changes in hormones, heart rate, and other characteristics associated with sleep. Sleep also affects some kinds of epilepsy in complex ways. REM sleep seems to help prevent seizures that begin in one part of the brain from spreading to other brain regions, while deep sleep may promote the spread of these seizures. Sleep deprivation also triggers seizures in people with some types of epilepsy.

[0014] Sleeping problems occur in almost all people with mental disorders, including those with depression and schizophrenia. People with depression, for example, often awaken in the early hours of the morning and find themselves unable to get back to sleep. The amount of sleep a person gets also strongly influences the symptoms of mental disorders. Sleep deprivation is an effective therapy for people with certain types of depression, while it can actually cause depression in other people. Extreme sleep deprivation can lead to a seemingly psychotic state of paranoia and hallucinations in otherwise healthy people, and disrupted sleep can trigger episodes of mania (agitation and hyperactivity) in people with manic depression. Sleeping problems are common in many other disorders as well, including Alzheimer's Disease, stroke, cancer, and head injury. These sleeping problems may arise from changes in the brain regions and neurotransmitters that control sleep, or from the drugs used to control symptoms of other disorders.

[0015] A greater understanding of the factors that affect sleep would facilitate the development of new and improved treatments of sleep disorders and sleep deprivation. Knowledge of such factors may result in the development of compounds to assist in continuous performance or sleep deprivation recovery, and would be particularly valuable in many branches of military, airline, medical and emergency, and security industries.

### SUMMARY OF THE INVENTION

[0016] Thus, in accordance with the present invention, there is provided a method of screening for a sleep altering composition comprising (a) providing a Drosophila cell; (b) contacting said cell with a candidate compound; and (c) measuring the effect of said compound on expression level or activity of a first gene product encoded by the group of genes consisting of CG18190, Jheh 1, CG7228, lama, disco, CG6664, Casein kinase II β subunit, CG9171, GstE1, cAMP-dependent protein kinase R2, CG15161, MESR3, Meics, Atpalpha, Calx, Rlip, nompC, H15, Lam, Glu-RIIA, Glu-RIIB, Ork1, Shaker, and Hyperkinetic, whereby a change in the expression level or activity of said gene product, as compared to the expression level or activity of said gene product in a similar cell not treated with said candidate compound, indicates that said candidate compound is a sleep altering composition. The Drosophila cell may be a neuronal cell. The cell may be located in a living fly. The composition may promote sleep, inhibit sleep, promote recovery from sleep deprivation or reduce the need for sleep.

[0017] The method may further comprise measuring the effect of said compound on the expression level or activity of a second gene product from said group. Measuring expression level may comprises measuring mRNA levels for said first gene product, measuring mRNA turnover for said first gene product, measuring protein levels for said first gene product. Measuring may further comprise a technique selected from the group consisting of quantitative RT-PCR Northern blot, ELISA or Western blot. Measuring activity may also comprise an assay for enzyme function or binding function. The method may also further comprise measuring the expression level or activity of said gene product in a similar cell not treated with said candidate compound, i.e., a negative control. The method may also further comprise treating said cell with a known sleep modulating composition, i.e., a positive control. The method may further comprise assessing the effect of said candidate substance on an intact organism.

[0018] In another embodiment, there is provided a method of reducing the need for sleep in a subject comprising modulating the expression level or activity of a gene product encoded by the group consisting of CG18190, Jheh 1, CG7228, lama, disco, CG6664, Casein kinase II β subunit, CG9171, GstE1, cAMP-dependent protein kinase R2, CG15161, MESR3, Meics, Atpalpha, Calx, Rlip, nompC, H15, Lam, Glu-RIIA, Glu-RIIB, Ork1, and Shaker, and Hyperkinetic. The expression level or activity of one or more gene product encoded by CG18190 and Jheh 1 may be increased, for example, by providing the gene product or small molecule agonist to said subject. The gene product or agonist may be provided to said subject multiple times over a defined period. The method may also further comprise providing a stimulant to said subject. Alternatively, the expression level or activity of Ork1 may be decreased, for example, by providing an antisense molecule, a ribozyme, an interfering RNA or an antagonist small molecule to said subject. The antisense, ribozyme, siRNA or antagonist may be provided to said subject multiple times over a defined period. The subject may suffer from a sleep disorder or from environmental sleep deprivation.

[0019] Yet another embodiment comprises a method of promoting recovery from sleep loss in a subject comprising modulating the expression level or activity of a gene product encoded by from the group of genes consisting of CG18190, Jheh 1, CG7228, lama, disco, CG6664, Casein kinase II β subunit, CG9171, GstE1, cAMP-dependent protein kinase R2, CG15161, MESR3, Meics, Atpalpha, Calx, Rlip, nompC, H15, Lam, Glu-RIIA, Glu-RIIB, Ork1, and Shaker, and Hyperkinetic. The expression level or activity of one or more gene products encoded by CG18190 or Jheh 1 may be increased, for example, by providing the gene product or an agonist small molecule to said subject. The gene product or agonist may be provided to said subject multiple times over a defined period. The method may further comprise providing a stimulant to said subject. Alternatively, the expression level or activity of Ork1 may be decreased, for example, by providing an antisense molecule, a ribozyme, an interfering RNA or an antagonist small molecule to said subject. The antisense molecule, ribozyme, interfering RNA or antagonist small molecule may be provided to said subject multiple times over a defined period. The subject may suffer from a sleep disorder or from environmental sleep deprivation.

[0020] In still yet another embodiment, there is provided a method of inhibiting sleep in a subject comprising modulating the expression level or activity of a gene product encoded by a gene selected from the group consisting of CG18190, Jheh 1, CG7228, lama, disco, CG6664, Casein kinase II β subunit, CG9171, GstE1, cAMP-dependent protein kinase R2, CG15161, MESR3, Meics, Atpalpha, Calx, Rlip, nompC, H15, Lam, Glu-RIIA, Glu-RIIB, Ork1, and Shaker, and Hyperkinetic. The expression level or activity of one or more gene product encoded by CG18190 or Jheh 1 may be increased, for example, by providing the gene product or an agonist small molecule to said subject. The gene product or agonist may be provided to said subject multiple times over a defined period. The method may further comprise providing a stimulant to said subject. Alternatively, the expression level or activity of Ork1 may be decreased, for example, by providing an antisense molecule, a ribozyme, an interfering RNA or an antagonist small molecule to said subject. The antisense molecule, ribozyme, interfering RNA or antagonist small molecule may be provided to said subject multiple times over a defined period. The subject may suffer from a sleep disorder or from environmental sleep deprivation.

[0021] In a further embodiment, there is provided a method of increasing sleep in a subject comprising modulating the expression level or activity of a gene product encoded by the group consisting CG18190, Jheh 1, CG7228, lama, disco, CG6664, Casein kinase II β subunit, CG9171, GstE1, cAMP-dependent protein kinase R2 , CG15161, MESR3, Meics, Atpalpha, Calx, Rlip, nompC, H15, Lam, Glu-RIIA, Glu-RIIB, Ork1, and Shaker, and Hyperkinetic. The expression level or activity of Ork1 may be increased, for example, by providing the gene product or an agonist small molecule to said subject. The gene product or agonist may be provided to said subject multiple times over a defined period. The method may further comprise providing a sedative to said subject. Alternatively, the expression level or activity of one or more gene product encoded by CG18190 or Jheh 1 may be decreased, for example, by providing an antisense molecule, a ribozyme, an interfering RNA or an antagonist small molecule to said subject. The antisense molecule, ribozyme, interfering RNA or antagonist small molecule may be provided to said subject multiple times over a defined period. The subject may suffer from a sleep disorder.

[0022] In still yet a further embodiment, there is provided a method for identifying the basis of a sleep disorder in a subject comprising (a) obtaining mRNA from a neuronal cell of said subject; and (b) measuring the expression level or activity of SEQ ID NOS:2, 4, 6, 8, 10, 12, 14, 16, 18, 20, 22, 24, 26, 28-30, 32, 34, 36, 38, 40, 42, 44, 46, 48, 54 and/or 55, whereby a change in the expression level or activity of a gene product in step (b), as compared to the expression level or activity of said gene product in a similar cell from a normal subject, identifies the basis of said sleep disorder.

[0023] Other embodiments include an isolated and purified nucleic acid comprising a segment encoding a polypeptide selected from the group consisting of SEQ ID NOS:2, 4, 6, 8, 10, 12, 14, 16, 18, 20, 22, 24, 26, 28-30, 32, 34, 36, 38, 40, 42, 44, 46, 48, 54 and/or 55. The nucleic acid may further comprise a promoter operably linked to said segment, wherein said promoter is active in eukaryotic cells, an may also further comprise a replication competent vector. The vector may be a plasmid vector or a viral vector. The nucleic acid may comprise a DNA sequence selected from the group consisting of CG18190, Jheh 1, CG7228, lama, disco, CG6664, Casein kinase II β subunit, CG9171, GstE1, cAMP-dependent protein kinase R2, CG15161, MESR3, Meics, Atpalpha, Calx, Rlip, nompC, H15, Lam, Glu-RIIA, Glu-RIIB, Ork1, Shaker, and Hyperkinetic.

[0024] The present invention further encompasses an isolated and purified polypeptide selected from the group consisting of SEQ ID NOS:2, 4, 6, 8, 10, 12, 14, 16, 18, 20, 22, 24, 26, 28-30, 32, 34, 36, 38, 40, 42, 44, 46, 48, 54 and/or 55. In addition, an isolated and purified peptide of no more than about 50 amino acids in length comprising a segment of 15 or more consecutive residues from a polypeptide selected from the group consisting of SEQ ID NOS:2, 4, 6, 8, 10, 12, 14, 16, 18, 20, 22, 24, 26, 28-30, 32, 34, 36, 38, 40, 42, 44, 46, 48, 54 and/or 55 is contemplated. The segment may comprise 20 or more, 25 or more, 30 or more, 35 or more, 40 or more, 45 or more, 50 or more 75 or more, or up to about 100 consecutive residues of said polypeptide.

[0025] Also provided are an isolated and purified oligonucleotide of no more than about 50 nucleotides in length comprising a segment of 15 or more consecutive bases from a polynucleotide selected from the group consisting of SEQ ID NOS:1, 3, 5, 7, 9, 11, 13, 15, 17, 19, 21, 23, 25, 27, 31, 33, 35, 37, 39, 41, 43, 45, 47 and/or 53, such as where the segment comprises 20 or more, 25 or more, 30 or more, 35 or more, 40 or more, 45 or more, 50 or more, 75 or more or about 100 consecutive bases of said polynucleotide. The oligonucleotide may be labeled with a detectable label.

[0026] Polyclonal antisera, antibodies of which bind immunologically to a polypeptide selected from the group consisting of SEQ ID NOS:2, 4, 6, 8, 10, 12, 14, 16, 18, 20, 22, 24, 26, 28-30, 32, 34, 36, 38, 40, 42, 44, 46, 48, 54 and/or 55, or a monoclonal antibody that binds immunologically to a polypeptide selected from the group consisting of SEQ ID NOS:2, 4, 6, 8, 10, 12, 14, 16, 18, 20, 22, 24, 26, 28-30, 32, 34, 36, 38, 40, 42, 44, 46, 48, 54 and/or 55, are provided as well.

[0027] As used herein the specification, “a” or “an” may mean one or more. As used herein in the claim(s), when used in conjunction with the word “comprising”, the words “a” or “an” may mean one or more than one. As used herein “another” may mean at least a second or more.

[0028] Other objects, features and advantages of the present invention will become apparent from the following detailed description. It should be understood, however, that the detailed description and the specific examples, while indicating preferred embodiments of the invention, are given by way of illustration only, since various changes and modifications within the spirit and scope of the invention will become apparent to those skilled in the art from this detailed description.

### BRIEF DESCRIPTION OF THE DRAWINGS

[0029] The following drawings form part of the present specification and are included to further demonstrate certain aspects of the present invention. The invention may be better understood by reference to one or more of these drawings in combination with the detailed description of specific embodiments presented herein.

[0030] FIGS. 1A-D. Analysis of locomotor activity and sleep in fruit flies.

[0031] FIG. 1A—Schematic of the ultrasound activity monitoring system. A 44-kHz standing wave is passed across an independent enclosure containing a single fly. An integrated circuit samples a portion of each wave as a function of the transmit signal and compares it to the output from the receive signal for the same time window. When the fly moves its mass within the field, it perturbs the standing wave, and the resulting difference is counted as a movement. The output is sampled by a PC at 200 Hz, data are summed in 2-s bins, and stored for later processing (modified from ref. 23)

[0032] FIG. 1B—A Drosophila Activity Monitoring System (DAMS) monitor containing thirty-two 6.5-mm (5 mm I.D.) glass tubes, each housing a single fly.

[0033] FIG. 1C—Twenty-four hour locomotor activity of a single female wild-type Canton-S fly as measured by the DAMS infrared system. The fly is mostly active during the light period (from 8 am to 8 pm), and inactive during the dark period, when episodes of uninterrupted quiescence can last for several hours.

[0034] FIG. 1D—Typical pattern of sleep in a population of 96 female wild-type Canton-S flies as measured in a DAMS monitor. DAMS measures activity as counts (number of crossings) per minute. Wakefulness is defined as any period of at least 1 minute characterized by activity (one or more counts per minute; see FIG. 1C). Based on arousal threshold data, sleep is defined as any period of uninterrupted behavioral quiescence (no counts/min) lasting for at least 5 min. Mean values of the amount of sleep are calculated on consecutive 30-min time intervals and the time course is graphically shown over the entire day. In female flies, most of the sleep occurs at night (FIGS. 1C-D, Cirelli et al., unpublished data).

[0035] FIGS. 2A-D. The homeostatic regulation of sleep in the fruit flies.

[0036] FIG. 2A—The sleep deprivation apparatus in the inventors' laboratory. Each of the five framed boxes holds 10 DAMS monitors.

[0037] FIG. 2B—Increase in sleep duration following 6, 12, and 24 hours of sleep deprivation (SD) in female Canton-S flies (n=20-40 for each experiment). Each diagram shows the daily amount of sleep for baseline day (blue line), SD day (red line), and the first recovery day after SD (green line). Time and duration of SD are indicated by the red bars below the x axis. An increase in sleep duration is present after all 3 periods of SD, and occurs mainly during the first 6 hours following the end of SD. Flies were maintained in a 12:12 light dark cycle (light on at 8 am).

[0038] FIG. 2C—Amount of sleep lost (during SD) and of sleep recovered (during the first 6 hours of recovery day 1) for the experiments shown in FIG. 2B. More sleep is recovered after 12-24 h SD than after 6 h SD. Since female flies sleep mostly during the night, there is no significant difference in the amount of sleep lost and sleep recovered between 24 h SD and 12 h SD during the night. When female flies are sleep deprived for 12 hours during the light period (the corresponding graph is not shown in FIG. 2B), there is no significant sleep loss, nor significant sleep rebound. Note that in flies, as in mammals, the amount of sleep recovered after SD represents only a fraction of the sleep lost.

[0039] FIG. 2D—To measure sleep fragmentation, a sleep continuity score is calculated, which increases during continuous epochs with no locomotor activity and decreases during epochs with one or more counts of activity. The sleep continuity score is high if sleep is continuous and undisturbed, and low if sleep is fragmented. Blue lines in the upper diagram represents sleep scores for 16 female Canton-S flies during baseline. Green lines in the lower diagram show the sleep score for the same flies the day following 24 h SD. Note the significant increase in the sleep score immediately after the end of SD. In several flies this increase persists during the following night (FIGS. 2B-D, Cirelli et al., unpublished data).

[0040] FIG. 3—The escape response to a complex stimulus in flies. During the vigilance test, flies remain in the DAMS monitor where their locomotor activity is continuously recorded. The stimulus is delivered randomly every 2-10 min at either side of the glass tubes.

[0041] FIG. 4—Testing vigilance in wild-type flies before and after sleep deprivation. Wild-type Canton-S flies (n=20) were tested during the first 3 hours of the light period the day before and the day after 24 h of sleep deprivation (SD). During baseline the latency to beam crossing decreases significantly after the stimulus compared to before the stimulus (* P<0.01, paired t-test). After SD, however, the latency to beam crossing is as high before the stimulus as after the stimulus. Thus, even when awake, wild-type flies sleep deprived for 24 hours are impaired in their ability to respond to the stimulus. Similar data wee obtained in white ¹¹¹⁸ flies.

[0042] FIGS. 5A-B. Testing memory in flies: the heat box.

[0043] FIG. 5A—The heat-box in the inventors' laboratory.

[0044] FIG. 5B—A schematic diagram of the apparatus with 3 of the 16 parallel chambers shown (from Zars et al., 2000). A computer receives position information for individual flies from a light gate array. This is used to calculate the performance index (PI). PI is the time spent in the unpunished half of the chamber minus the time spent in the punished half of the chamber, divided by the total time. PI can vary from −1 to +1, with flies that are perfect avoiders having PI=+1. PI=0 indicates no side preference. PI is measured during training, when it is a measure of heat avoidance, and after training, when it is a measure of memory.

[0045] FIGS. 6A-C. Identification of short sleeper mutant lines.

[0046] FIG. 6A—Intra-individual consistency and inter-individual variability in the daily amount of sleep in fruit flies. Daily amount of sleep is shown for four 7-day old virgin female flies of the same mutant line.

[0047] FIG. 6B—Daily amount of sleep in 1547 insertional lines (P lines from ref. 47, female flies). Mean amount of sleep/24 hour is 616±169 (mean±SD; min 131, max 1155). Shaded areas show one (dark red) and two (light red) standard deviations from the mean.

[0048] FIG. 6C—Daily amount of sleep in female (upper panel, n=16) and male (lower panel, n=15) flies of a short sleeper line. For comparison, the blue line in each panel represents the daily amount of sleep in wild-type Canton-S flies (n=16).

[0049] FIGS. 7A-C—Identification of “no-rebound” mutant lines.

[0050] FIG. 7A—Cumulative graph showing the time course of the sleep rebound following 24 hour of sleep deprivation (SD) in female wild-type Canton-S flies. Daily amount of sleep during baseline was 580 min. Sleep recovered is expressed as % of sleep lost. At the end of recovery day 1, ˜40% of sleep was recovered, half of which during the first 2-3 hours following the end of SD (red circle). No further recovery occurred during recovery day 2.

[0051] FIG. 7B—Percentage of sleep recovered during the first 6 hours following 24 h SD in 593 insertional lines (P. lines from ref. 47, female flies). Most lines recovered 20% of the sleep lost during SD.

[0052] FIG. 7C—Increase in the sleep continuity score after 24 h SD in 593 insertional lines (same lines as in FIG. 7B). Bars indicate sleep scores for the first 6 hours of the light period during baseline (sleep score=37±30, mean±SD, blue bars) and after 24 h SD (118±67, red bars). The higher the sleep score, the lower the sleep fragmentation.

[0053] FIGS. 8A-F—Sleep in flies of the lines 1174 and 1179, called ss (short sleepers) flies.

[0054] FIG. 8A—Distribution of daily sleep amounts in ˜9000 mutant lines for both female and male flies (16 flies/line, ≧3 independent experiments/line). Shaded areas show one and two standard deviations from the mean (mean±SD, females: 624±167; males: 910±155). Red asterisks indicate ss flies.

[0055] FIG. 8B—Daily time course (in 30-min intervals) of the amount of sleep in wild-type Canton-S (CS) and ss flies. Curves connect mean values±SEM (min of sleep/24 hours, CS females (n=63)=664±17; CS males (n=55)=923±21; ss heterozygous females (h, n=50)=564±32; ss homozygous females (ss, n=60)=247±22; ss males (ss, n=58)=297±34). The white and black bars under the x axis indicate the light and dark period, respectively.

[0056] FIG. 8C—Arousal threshold differences between epochs of activity and immobility during the dark period. The y axis represents the percentage of escape responses triggered by a complex stimulus of low intensity, which is used as a measure of arousal threshold. Most (≧60%) wild-type (wt) and ss flies respond if they had been active during the minute before the stimulus was delivered (black columns). However, the ability to respond decreases significantly, relative to the periods of activity, when flies are stimulated after a period of immobility of at least 5 min (n=30 flies/line; #, p<0.01, paired t-test). During the dark period the arousal threshold is also significantly decreased after 1 min of immobility. Values are mean±SEM for the entire 12-hour dark period.

[0057] FIG. 8D—Duration and number of sleep episodes during 24 hours of baseline recording in wild-type (wt) and ss flies (mean±SEM, 32 flies/line; *, p<0.05, t-test).

[0058] FIG. 8E—Daily time course of the amount of sleep in ss flies under 12:12 light-dark conditions (dashed line) and constant darkness (solid line; ss females (n=123)=163±17; ss males (n=34)=283±34).

[0059] FIG. 8F—Left panel. Locomotor activity of an individual wild-type fly (upper panel) and ss fly (lower panel) over 6 days in constant darkness. Actograms are double plotted. The grey bar under the plots represents subjective day, the black bar represents subjective night. Right panel. Autocorrelation analysis of locomotor behavior in wild-type and ss female flies kept in constant darkness for 7 consecutive days (n=130 flies/line). The asterisks indicate the rhythmicity index (RI), a measure of the strength of the activity rhythm (RI, wild-type=0.54, ss=0.52). The estimated period is 24.0 hours in wild-type flies and 24.1 hours in ss flies. Autocorrelation analysis for individual ss flies indicated that >90% are rhythmic (data not shown).

[0060] FIGS. 9A-D—Response to sleep deprivation (SD) and measures of performance in ss flies.

[0061] FIG. 9A—Increase in sleep duration after SD. Black columns represent sleep lost (in min) during 24 hours of SD, grey columns represent sleep gain—the number of minutes flies overslept relative to baseline during the first 24 h after SD (#, p<0.05, paired t-test). The amount of sleep recovered, expressed as percentage of sleep lost (red columns) ranges between 10 and 25% and is similar in wild type (wt, females and males) and ss flies. Note that positive and negative values on the y axis are on different scales.

[0062] FIG. 9B—Increase in sleep intensity after SD. In all flies the number of brief awakenings (upper panel) is significantly reduced during the light period after SD relative to baseline, while the duration of the sleep episodes (middle panel) is significantly increased (#, p<0.05, paired t-test, n=32 flies/line). In both cases the change is significantly smaller in ss flies relative to wild-type flies (*, p<0.05, t-test). Lower panel. Arousal threshold was measured as in FIG. 1C. Black columns represent the percentage of escape response in flies that had been moving the minute before the stimulus was delivered, while white and grey columns refer to flies that have been immobile for 5 min (sleeping flies). The percentage of flies responding to the stimulus is lower during recovery sleep after SD (grey columns) relative to baseline sleep (white columns) in both wild-type and ss flies, but the change is significant only in wild-type flies (n=32 flies/line; #, p<0.05; paired t-test) but not in ss flies (O=0.08). Values are mean±SEM for the first 6 hours of the light period after SD.

[0063] FIG. 9C—Upper panel. Locomotor activity measured in the Drosophila Activity Monitoring System as activity index (AI)—the number of beam crossings/min (n=16 female (f) and 16 male (m) flies/line, light period). Values were calculated including only awake flies. Lower panel. Locomotor behavior measured in the heat box during the 10-min adaptation period preceding the delivery of the thermal stimulus (all flies were awake during that period). The distance traveled per min is measured in arbitrary units (n=25 flies/line).

[0064] FIG. 9D—Assessment of performance before and after SD. Upper panel. The response to a complex stimulus is measured as the percentage increase in the number of beam crossings during the minute following the delivery of the stimulus relative to the minute prior to the stimulation. In wild-type flies, but not in ss flies, the increase is significantly reduced during recovery (rec) after SD relative to baseline (bl). All flies had been active (i.e., awake) during the minute before the delivery of the stimulus. Values are mean±SEM averaged for the entire light period (one stimulus/hour; n=32 flies/line, #, p<0.05, paired t-test). Lower panel. The response to a thermal stimulus is measured as the latency (in sec) to beam crossing after heat was applied to the side of the chamber housing the flies (mean±SEM, n=32 flies/line). The escape response after SD worsens (i.e., latency increases) in wild-type flies but not in ss flies. Each fly was tested once during the first 2 hours after the end of SD and at the corresponding time of day during baseline (#, p<0.05, paired t-test).

[0065] FIGS. 10A-D—The Shaker channel and the ss mutation.

[0066] FIG. 10A—The alpha subunit of the Shaker channel includes 6 transmembrane segments: S1-S4 form the voltage-sensor module, S5-S6 form the pore region.

[0067] FIG. 10B—Schematic representation of the Shaker transcription unit with 19 exons. The grey bar indicates the N-terminal variable region, the green bar indicates the common central region, and the blue bar indicates the C-terminal variable region. The red arrow indicates the approximate location of the ss mutation.

[0068] FIG. 10C—Sequence alignment of the S1 domain. The threonine residue is conserved between Shaker homologues in different species.

[0069] FIG. 10D—Shaker transcripts from fly heads and bodies. The probe was a fragment of 550 bp spanning exons 9 and 10. To check that equal amounts of RNA were being compared blots were reprobed with probes to actin (not shown).

[0070] FIGS. 11A-C—Genetic mapping of the shaking and short sleep phenotype in ss flies.

[0071] FIG. 11A—Cytological and genetic locations of the markers used to map the phenotypes.

[0072] FIG. 11B—Crossing scheme to generate recombinants. Left, heterozygous females (v f/Sh^{ss}) were crossed to v f males and the male progeny were divided by phenotype (shaking, forked and vermillion) into one of the six genotypes. Right, daily sleep amount for each of the six genotypes. Number (N) indicates the number of individual flies tested. In classes 1 through 4 the male progeny from the cross were directly tested. In classes 5 and 6 (*), there were not enough isolates to generate a statistically valid number. Instead, males in classes 5 and 6 were crossed to females (C(1)x) and the recombinant chromosomes generated from this cross were individually tested. Two recombinant chromosomes in classes 5 and eight recombinant chromosomes in class 6 consistently produced a short sleeper and a normal sleeper phenotype, respectively. As such, the individual data were combined for this graph.

[0073] FIG. 1C—Complementation results between Sh^{ss} and previously described Sh alleles for the recessive ss phenotype. The Allele/Sh^{ss} heterozygous females were generated from crosses between Sh^{ss} females and males with the Sh allele indicated in the first column on the left. For comparison, Allele/Sh⁺ heterozygous females are included. The Allele/Sh⁺ were generated by crossing w¹¹¹⁸ females to males with the Sh allele indicated in the first column on the left. Daily sleep amount (mean±SEM, min/24 h) was recorded over two days. Female flies with daily sleep amount≦290 min are below 2 standard deviations from the norm (FIG. 1A). Only Sh¹⁰²/Sh^{ss} shows a strong short sleeper phenotype and therefore fails to complement the ss phenotype of Sh^{ss}.

[0074] FIG. 12—Distribution of daily sleep amounts in male flies of ˜9000 mutant lines and in several Shaker alleles (thin black lines). The null alleles Sh¹⁰² Sh¹³³, and Sh^{M} are shown both before (black line) and after (red line) being outcrossed to w¹¹¹⁸ (Sh⁺). In Sh¹⁰², Sh¹³³, and Sh^{M} flies daily sleep amount before the outcrossing was (min/day, mean±SEM) 593±17, 890±27, and 705±22, respectively. After the outcrossing it was 181±36, 427±29, and 274±28, respectively. Wild-type CS and white¹¹¹⁸ flies (thick black lines) are shown for comparison. The blue line indicates ss flies. For each line at least 30 flies were tested in 2 independent experiments.

[0075] FIGS. 13A-B—The injection of anti-Kv1.2 on the right cerebral cortex causes a significant and prolonged decrease of slow waves on the side of the injection. Slow waves are the most prominent marker of slow wave sleep, and their presence can be quantified by using power spectrum analysis of the EEG signal. Slow waves correspond to the frequency band of 0.5-4 Hz. In FIG. 13B, note that other frequency bands outside the slow waves range are not affected by the anti-Kv1.2 unilateral injection.

### DESCRIPTION OF ILLUSTRATIVE EMBODIMENTS

[0076] As discussed above, the response to sleep and sleep deprivation is likely a complex one that affects many different aspects of an individual's overall waking performance. Unfortunately, for many endeavors—military, airline, medical and emergency, and security industries to name a few—it is common for personnel to work extremely long hours and to have extended periods where they are given only brief opportunities for sleep. Thus, the present invention seeks to provide compositions and methods for addressing the need for sleep response-modifying therapies.

[0077] The present invention is based in part on the inventors' discovery of various genes that are associated with a diminished sleep requirement and normal continuous performance in Drosophila. Using the fruit fly as an experimental model, the inventors have identified genes that are associated with a diminished sleep requirement as well as those that permit to maintain a normal level of performance after sleep deprivation.

[0078] The fruit fly, Drosophila melanogaster, has been used as an ubiquitous model for the characterization of cellular processes (e.g., signaling pathways) involved in a variety of human diseases. In fact, the cellular functions of many genes known to be affected in human diseases were initially identified in Drosophila (see e.g., Holley et al., 1997). This high degree of conservation of morphogenetic processes between Drosophila and humans has made Drosophila a prime model system for the identification of putative drug targets using function based genetic approaches. The fruit fly is now an established model system to study gene-related disorders in humans. Extensive genome database resources (13,600 genes sequenced and annotated) are available. In addition, fruit fly genetics is simple enough to perform rapid mutagenesis, screenings, and breedings to elucidate the genetics of particular disorders.

[0079] The majority of fly genes are shared with humans. In fact, it is becoming increasingly apparent that the vertebrate genome arose from the amplification of a core set of genes not much larger than that of the fly. The majority (77%) of the genes involved in human diseases have fly counterparts (Reiter et al., 2001), and the expression of human genes into flies very often results in phenotypes that mimic human diseases (e.g., human α-synuclein in Drosophila causes a phenotype that resembles human Parkinson's disease; Auluck et al., 2002). In addition to myriad similarities in cellular structure and function, humans and flies share pathways for intercellular and intracellular signaling (from membrane receptors and ion channels to nuclear transcription factors), developmental patterning, learning and behavior, as well as tumor formation and metastasis, to give just a few examples (Littleton and Ganetzky, 2000). Thus, flies are now taken as simplified versions of vertebrate animals rather than simply as models of themselves.

[0080] Flies are neuro-biologically complex organisms with some 250,000 neurons. The fruit fly sleeps and needs sleep in much the same way as humans and other mammals do (Shaw et al., 2000). Fruit fly sleep, like sleep in mammals, is characterized by increased arousal threshold, changes in brain electrical activity, and is homeostatically regulated independent of the circadian clock. Also as in mammals, sleep is abundant in young flies and it is reduced in older flies, and is modulated by stimulants such as caffeine and hypnotics. Finally, several molecular markers modulated by sleep and wakefulness in mammals are also modulated by behavioral state in Drosophila.

[0081] The present inventors' have discovered various Drosophila genes that are associated with a diminished sleep requirement and normal continuous performance. In particular, the inventors have devised extensive experimental measurements of brain activity (EEG-like recordings), monitoring of locomotor activity, and vigilance tests that were implemented simultaneously in thousands of fruit flies. Based on these studies, they have now identified candidate genes that are associated with continuous performance in the fruit fly. Eighteen “short sleeper” and 5 sleep deprivation-resistant lines (in which sleep deprivation that does not result in low performance) were identified. Most of the affected genes associated with these lines have been identified. The sequence of these genes, and in some cases the function of the genes, are known. For others, this is the first report of functional significance.

[0082] The details of the present invention are described in the following pages.

A. Drosophila melanogaster

[0083] 1. Basics

[0084] Drosophila melanogaster is a fruit fly, an insect about 3 mm long, of the kind that accumulates around spoiled fruit. It is also one of the most valuable of organisms in biological research, particularly in genetics and developmental biology. Drosophila has been used as a model organism for research for almost a century, and today, several thousand scientists are working on many different aspects of the fruit fly. Its importance for human health was recognized by the award of the Nobel Prize in medicine/physiology to Ed Lewis, Christiane Nusslein-Volhard and Eric Wieschaus in 1995.

[0085] Part of the reason people work on Drosophila is historical—so much is already known about it that it is easy to handle and well-understood. Part of it is practical—it is a small organism with a short life cycle of just two weeks, and is cheap and easy to keep large numbers. Mutant flies, with defects in any of several thousand genes are available, and the entire genome has recently been sequenced. Together, these advantages draw many researchers to use this system for a wide variety of scientific endeavors.

[0086] The Drosophila egg is about half a millimeter long. It takes about one day after fertilization for the embryo to develop and hatch into a worm-like larva. The larva eats and grows continuously, molting one day, two days, and four days after hatching (first, second and third instars). After two days as a third instar larva, it molts one more time to form an immobile pupa. Over the next four days, the body is completely remodeled to give the adult winged form, which then hatches from the pupal case and is fertile after another day (timing is for 25° C.; at 18° C., development takes twice as long).

[0087] Drosophila is so popular that, it would be almost impossible to list the number of things that are being done with it. Originally, it was mostly used in genetics, for example, to discover that genes were related to proteins and to study the rules of genetic inheritance. More recently, it has been used extensively in developmental biology, looking to see how a complex organism arises from a relatively simple fertilized egg. Embryonic development is where most of the attention is concentrated, but there is also a great deal of interest in how various adult structures develop in the pupa, mostly focused on the development of the compound eye, but also on the wings, legs and other organs.

[0088] Drosophila has four pairs of chromosomes: the X/Y sex chromosomes and the autosomes 2, 3, and 4. The fourth chromosome is quite tiny and rarely heard from. The size of the genome is about 165 million bases and contains and estimated 14,000 genes (by comparison, the human genome has 3,300 million bases and may have about 40,000 genes; yeast has about 5800 genes in 13.5 million base bases). The genome is now completely sequenced, and analysis of the data continues.

[0089] Polytene chromosomes are the magic markers that first put Drosophila in the spotlight. As the fly larva grows, it keeps the same number of cells, but needs to make much more gene product. The result is that the cells get much bigger and each chromosome divides hundreds of times, but all the strands stay attached to each other. The result is a massively thick polytene chromosome, which can easily be seen under the microscope. Even better, these chromosomes have a pattern of dark and light bands, like a bar code, which is unique for each section of the chromosome. As a result, by reading polytene bands, one can see what part of the chromosome one is looking at. Any large deletions, or other rearrangements of part of a chromosome can be identified, and using modern nucleic acid probes, individual cloned genes can be placed on the polytene map.

[0090] The standard map of the polytene chromosome divides the genome into 102 numbered bands (1-20 is the X, 21-60 is the second, 61-100 the third and 101-102 the fourth); each of those is divided into six letter bands (A-F) and those are subdivided into up to 13 numbered divisions. The location of many genes is known to the resolution of a letter band, usually with a guess to the number location (e.g., 42C7-9, 60A1-2). The polytene divisions do not have exactly the same length of sequence in them, but on average, a letter band contains about 300 kB of DNA, and 15-25 genes.

[0091] 2. Nomenclature

[0092] The rules of Drosophila nomenclature are well defined and reasonably straightforward. For example, each gene has both a unique name and a unique gene symbol that is usually shorter than the name and contains no spaces, allowing genotypes to be described in an unambiguous and manageable way. Both are italicized in print. In general, genes are named in one of three ways. First, according to a mutant phenotype of the gene (generally the phenotype of the first mutant allele identified), e.g., white (w), Shaker (Sh), and cubitus interruptus (ci). The name and symbol are capitalized if the phenotype of the mutant allele for which the gene was named is dominant to a wild-type allele. Be aware, however, that many nominally ‘dominant genes’ have recessive alleles and many ‘recessive genes’ have dominant alleles.

[0093] Second, genes may be named according to a category of phenotypic effect, such as suppressor, enhancer, Minute, lethal, sterile, along with identifying information relevant to the class (the name of the gene that is suppressed or enhanced, or the chromosomal location of Minutes, lethals and steriles). Examples include: suppressor of forked (su(f)), Enhancer of Star (E(S)), Minute (1)15D (M(1)15D), lethal (3)85Ea (1(3)85Ea), and male sterile (2)1 (ms(2)1).

[0094] Third, when the product of a gene is known, the gene is typically named according to the product encoded, with a chromosomal location or series number if part of a multigene family. Examples include Tubulin (3)67C (Tub67C), Superoxide dismutase (Sod), and transfer RNA arginine (tRNA-Arg1). Superscripts identify individual mutant alleles of a gene: w^{a}, l(2)40Fg¹, Antp^{LC}. A “+” superscript indicates a wild-type allele of the gene. A “+” in place of a gene symbol indicates that the chromosome or the complete genotype, depending on the context, is wild type.

[0095] Chromosome aberrations are named according to the type of rearrangement, the chromosome or chromosomes involved, and an identifying symbol. The basic types of aberrations and their abbreviations are: deficiency (Df), duplication (Dp), inversion (In), transposition (Tp), translocation (T), compound (C), ring (R), levosynaptic element (LS) and dextrosynaptic element (DS). These are written as: Type(Chromosome)Identifier. The identifier may or may not convey information about the rearrangement. For example, Df(3R)by10 is the name of a deficiency in the right arm of the third chromosome; in this case the identifier reflects the inclusion of the blistery (by) gene within the deficiency and the 10 distinguishes it from others in a series. Superscripts, which define unique alleles, are not used with symbols of genes deleted by deficiencies (they are used only when the gene is interrupted, rather than removed, by the aberration). Df(3R)by10, Df(3R)by62, and Df(3R)by77 represent three unique deficiencies, but not unique alleles of by—the gene is equally absent in all three aberrations. T(2;3)ap^{Xa} refers to a translocation between chromosomes 2 and 3; here the translocation is named for the mutant allele of the apterous gene that results from one of the translocation breakpoints. Tp(1;3)O4 names a three-break event that resulted in the insertion of a piece of chromosome 1 into chromosome 3. In this case the identifier, O4, is arbitrary, formed from the name of the person who recovered the aberration and a series number.

[0096] Balancers are an important class of aberration and one for which shorthand is commonly used. Lindsley & Zimm (1992) define a set of core balancer symbols that are commonly used to represent a particular set of aberrations and markers. The most popular balancers exist in a variety of marker combinations, all with at least one dominant visible marker. There are three different standard ways of representing balancer chromosomes. (1) balancer symbol—a single symbol represents a unique set of aberrations and markers, e.g., TM3-Sb; (2) balancer short genotype—a core balancer symbol is combined with aberration, transposon and allele symbols to describe a unique balancer variant, e.g., TM3, Sb[1]; and (3) balancer full genotype—all aberration, transposon and allele symbols that comprise the unique balancer variant are explicitly stated, e.g., In(3LR)TM3, kni^{ri-1} p^{p} sep¹ l(3)89Aa¹ Sb¹ Ubx^{bx-}^{34e} e¹.

[0097] Transposon nomenclature has four basic parts: source of transposon ends, included genes, construct symbol, and insertion identifier. A transposon symbol is composed of ends{symbol}. A full transposon genotype adds the gene^{allele} symbols of all included genes, with the form ends{genes=symbol}. The symbol for a specific insertion of a given transposon has the form ends{symbol}identifier.

[0098] A properly assembled genotype represents all mutant components of the stock in the order 1;Y;2;3;4. Within a chromosome, aberrations precede gene symbols. A comma and space separate aberrations from gene symbols and genes are listed in the left-right order of the unrearranged chromosome. Gene symbols are separated by a space. Homologues are separated by a solidus (/) and heterologues are separated by a semicolon. Homozygous chromosomes are defined only once: cn bw implies cn bw/cn bw, and + implies +/+.

[0099] For example: (a) cv¹; sp¹; th¹—the stock is homozygous for three recessive mutations, crossveinless 1 on chromosome 1, speck 1 on 2, and thread 1 on 3; (b) In(1)dl-49+B^{M1}, sc¹ v^{Of}—the stock is homozygous for two inversions on the X, delta-49 and Bar of Muller, and two recessive mutations, scute 1 and vermillion Of; (c) Df(3L)emc5, red¹ /TM2, emc² p^{p} Ubx¹ e^{s}—the stock is heterozygous for a deficiency on the left arm of chromosome 3 that includes the extra macrochaetae gene, and also carries a mutation in the red gene (adults will express the recessive emc phenotype as well as the dominant Ubx phenotype because the balancer carries a mutant allele of emc in addition to the standard TM2 markers pink peach, Ultrabithorax 1, and ebony sooty); (d) T(2;3)CyOTM6, CyO: TM6/pr¹ cn¹ Adh^{ufs}; mwh¹ ry⁵⁰⁶ e¹—a translocation is superimposed on two balancer chromosomes, CyO and TM6 (the normal sequence homologues carry mutations in the 2nd chromosome genes purple, cinnabar and Alcohol dehydrogenase and the 3rd chromosome genes multiple wing hair, rosy and ebony); and (e) y¹ w¹¹¹⁸ P{ry^{+7.2}=hsFLP}1; TM3, ry^{RK} Sb¹ Ser¹/TM6B, ry^{CB} Tb¹ ca¹—this stock carries mutant alleles of yellow and white on the X as well as a P element transposon that is marked with a functionally wild-type allele of the rosy gene, as well an allele that expresses the yeast FLP gene, but in most cases only visible markers are shown in transposon genotypes (the symbol for this specific construct is hsFLP, and the identifier for this particular insertion of the hsFLP construct is 1).

[0100] The rules for designating autosomal homologues can't be strictly applied to sex chromosomes. Sometimes the genotypes of both sexes are explicitly defined, using the form X/X x X/Y or X/X & X/Y. More often a condensed notation is used and it is left to the user to apply the rules of segregation and sex determination to identify the genotype of each sex. For example, compound 1st, or attached-X, chromosomes are commonly used to create balanced stocks of X-linked female sterile mutations. In a stock of the female sterile mutation diminutive 1, the genotypes of males and females are dm¹/Y and C(1)DX/Y, respectively, but the stock genotype is usually written as dm¹/C(1)DX. The latter seems to imply a stock of triplo-X flies, but triplo-X metafemales have extremely low viability and survivors are sterile. The only interpretation consistent with the biology is that females carry a maternally inherited compound X, males carry a paternally inherited dm¹ X, and both sexes carry a wild-type Y chromosome inherited from the opposite sex.

B. Peptides and Polypeptides

[0101] In one aspect of the invention, previously unknown polypeptides that are involved with sleep are provided in an isolated and purified state. A list of these genes is provided in TABLE 1, and are included in the sequence listing as SEQ ID NOS:2, 4, 6, 8, 10, 12, 14, 16, 18, 20, 22, 24, 26, 28, 30, 54 and 55.

TABLE 1
Novel Sleep Gene List

| | | Cytogenetic | |
|---|---|---|---|
| Fly lines | Gene name | map | SEQ ID NOS. |
| EP(2)2508 (24/7) | CG18190, Jheh 1 | 55F7 | 1(2), 3(4) |
| 2p32 | CG7228 | 28D3 | 5(6) |
| 3p161 | lama | 64C15 | 7(8) |
| 5682 | disco | 14B1 | 9(10) |
| 13303 | CG6664 | 73E4 | 11(12) |
| 12739 | Casein kinase II | 10E3 | 13(14) |
| | β subunit | | |
| 12748 | CG9171 | 25F4 | 15(16) |
| 12832 | GstE1 | 55C6 | 17(18) |
| EP(2)2162) | cAMP-dependent | 46D1 | 19(20) |
| | protein kinase R2 | | |
| EP(2)2221 | CG15161, MESR3 | 36F7-9 | 21(22), 23(24) |
| EP(3)3717 | Meics | 70C7 | 25(26) |
| Df 3357 | Atpalpha, Calx, Rlip | 93B2-5 | 27(28-30), |
| | | | 31(32), 33(34) |
| Df 3788 | nompC, H15, Lam, | 25D6-F5 | 35(36), 37(38) |
| | Glu-RIIA, Glu-RIIB | | 39(40), 41(42) |
| | | | 43(44) |
| Df 5707 | Ork1 | 9F7-8 | 45(46) |
| EMS 1174, 1179 | Shaker | 16F4-5 | 47(48-52) |
| Hk1, Hkx | Hyperkinetic | 9B5 | vvv |

[0102] Other embodiments of the present invention pertain to isolated and purified peptides of about 10 to no more than about 50 amino acids in length comprising a segment of 10 or more residues from the polypeptide discussed above. These peptides (or fragments) of the polypeptides that may or may not retain various of the functions discussed above. Peptides may be produced de novo using chemical synthesis. Fragments, including the N-terminus of the molecule may be generated by genetic engineering of translation stop sites within the coding region (discussed below). Alternatively, treatment of the polypeptide with proteolytic enzymes, known as proteases, can produce a variety of N-terminal, C-terminal and internal fragments. Examples of fragments may include contiguous residues of SEQ ID NOS:2, 4, 6, 8, 10, 12, 14, 16, 18, 20, 22, 24, 26, 28-30, 32, 34, 36, 38, 40, 42, 44, 46, 48, 54 or 55 that are 10, 11, 12, 13, 14, 15, 16, 17, 18, 19, 20, 21, 22, 23, 24, 25, 30, 35, 40, 45, 50, 55, 60, 65, 75, 80, 85, 90, 95, 100, 200, 300, 400 or more amino acids in length. These fragments may be purified according to known methods, such as precipitation (e.g., ammonium sulfate), HPLC, ion exchange chromatography, affinity chromatography (including immunoaffinity chromatography) or various size separations (sedimentation, gel electrophoresis, gel filtration).

[0103] 1. Variants of Polypeptides

[0104] Amino acid sequence variants of the polypeptides of the present invention can be substitutional, insertional or deletion variants. Deletion variants lack one or more residues of the native protein which are not essential for function or immunogenic activity, and are exemplified by the variants lacking a transmembrane sequence described above. Another common type of deletion variant is one lacking secretory signal sequences or signal sequences directing a protein to bind to a particular part of a cell. Insertional mutants typically involve the addition of material at a non-terminal point in the polypeptide. This may include the insertion of an immunoreactive epitope or simply a single residue. Terminal additions, called fusion proteins, are discussed below.

[0105] Substitutional variants typically contain the exchange of one amino acid for another at one or more sites within the protein, and may be designed to modulate one or more properties of the polypeptide, such as stability against proteolytic cleavage, without the loss of other functions or properties. Substitutions of this kind preferably are conservative, that is, one amino acid is replaced with one of similar shape and charge. Conservative substitutions are well known in the art and include, for example, the changes of: alanine to serine; arginine to lysine; asparagine to glutamine or histidine; aspartate to glutamate; cysteine to serine; glutamine to asparagine; glutamate to aspartate; glycine to proline; histidine to asparagine or glutamine; isoleucine to leucine or valine; leucine to valine or isoleucine; lysine to arginine; methionine to leucine or isoleucine; phenylalanine to tyrosine, leucine or methionine; serine to threonine; threonine to serine; tryptophan to tyrosine; tyrosine to tryptophan or phenylalanine; and valine to isoleucine or leucine.

[0106] The following is a discussion based upon changing of the amino acids of a protein to create an equivalent, or even an improved, second-generation molecule. For example, certain amino acids may be substituted for other amino acids in a protein structure without appreciable loss of interactive binding capacity with structures such as, for example, antigen-binding regions of antibodies or binding sites on substrate molecules. Since it is the interactive capacity and nature of a protein that defines that protein's biological functional activity, certain amino acid substitutions can be made in a protein sequence, and its underlying DNA coding sequence, and nevertheless obtain a protein with like properties. It is thus contemplated by the inventors that various changes may be made in the DNA sequences of genes without appreciable loss of their biological utility or activity, as discussed below. Table 1 shows the codons that encode particular amino acids.

[0107] In making such changes, the hydropathic index of amino acids may be considered. The importance of the hydropathic amino acid index in conferring interactive biologic function on a protein is generally understood in the art (Kyte and Doolittle, 1982). It is accepted that the relative hydropathic character of the amino acid contributes to the secondary structure of the resultant protein, which in turn defines the interaction of the protein with other molecules, for example, enzymes, substrates, receptors, DNA, antibodies, antigens, and the like.

[0108] Each amino acid has been assigned a hydropathic index on the basis of their hydrophobicity and charge characteristics (Kyte and Doolittle, 1982), these are: isoleucine (+4.5); valine (+4.2); leucine (+3.8); phenylalanine (+2.8); cysteine/cystine (+2.5); methionine (+1.9); alanine (+1.8); glycine (−0.4); threonine (−0.7); serine (−0.8); tryptophan (−0.9); tyrosine (−1.3); proline (−1.6); histidine (−3.2); glutamate (−3.5); glutamine (−3.5); aspartate (−3.5); asparagine (−3.5); lysine (−3.9); and arginine (−4.5).

[0109] It is known in the art that certain amino acids may be substituted by other amino acids having a similar hydropathic index or score and still result in a protein with similar biological activity, i.e., still obtain a biological functionally equivalent protein. In making such changes, the substitution of amino acids whose hydropathic indices are within ±2 is preferred, those which are within ±1 are particularly preferred, and those within ±0.5 are even more particularly preferred.

[0110] It is also understood in the art that the substitution of like amino acids can be made effectively on the basis of hydrophilicity. U.S. Pat. No. 4,554,101, incorporated herein by reference, states that the greatest local average hydrophilicity of a protein, as governed by the hydrophilicity of its adjacent amino acids, correlates with a biological property of the protein. As detailed in U.S. Pat. No. 4,554,101, the following hydrophilicity values have been assigned to amino acid residues: arginine (+3.0); lysine (+3.0); aspartate (+3.0±1); glutamate (+3.0±1); serine (+0.3); asparagine (+0.2); glutamine (+0.2); glycine (0); threonine (−0.4); proline (−0.5±1); alanine (−0.5); histidine *−0.5); cysteine (−1.0); methionine (−1.3); valine (−1.5); leucine (−1.8); isoleucine (−1.8); tyrosine (−2.3); phenylalanine (−2.5); tryptophan (−3.4).

[0111] It is understood that an amino acid can be substituted for another having a similar hydrophilicity value and still obtain a biologically equivalent and immunologically equivalent protein. In such changes, the substitution of amino acids whose hydrophilicity values are within ±2 is preferred, those that are within ±1 are particularly preferred, and those within ±0.5 are even more particularly preferred.

[0112] As outlined above, amino acid substitutions are generally based on the relative similarity of the amino acid side-chain substituents, for example, their hydrophobicity, hydrophilicity, charge, size, and the like. Exemplary substitutions that take various of the foregoing characteristics into consideration are well known to those of skill in the art and include: arginine and lysine; glutamate and aspartate; serine and threonine; glutamine and asparagine; and valine, leucine and isoleucine.

[0113] Another embodiment for the preparation of polypeptides according to the invention is the use of peptide mimetics. Mimetics are peptide-containing molecules that mimic elements of protein secondary structure (Johnson et al., 1993). The underlying rationale behind the use of peptide mimetics is that the peptide backbone of proteins exists chiefly to orient amino acid side chains in such a way as to facilitate molecular interactions, such as those of antibody and antigen. A peptide mimetic is expected to permit molecular interactions similar to the natural molecule. These principles may be used, in conjunction with the principles outline above, to engineer second generation molecules having many of the natural properties of the polypeptides of SEQ ID NOS:2, 4, 6, 8, 10, 12, 14, 16, 18, 20, 22, 24, 26, 28-30, 32, 34, 36, 38, 40, 42, 44, 46, 48, 54, or 55 but with altered and even improved characteristics.

[0114] 2. Domain Switching

[0115] Domain switching involves the generation of chimeric molecules using different but, in this case, related polypeptides, for example, homologs from different species. These molecules may have additional value in that these “chimeras” can be distinguished from natural molecules, while possibly providing the same function.

[0116] 3. Fusion Proteins

[0117] A specialized kind of insertional variant is the fusion protein. This molecule generally has all or a substantial portion of the native molecule, linked at the N- or C-terminus, to all or a portion of a second polypeptide. For example, fusions typically employ leader sequences from other species to permit the recombinant expression of a protein in a heterologous host. Another useful fusion includes the addition of a immunologically active domain, such as an antibody epitope, to facilitate purification of the fusion protein. Inclusion of a cleavage site at or near the fusion junction will facilitate removal of the extraneous polypeptide after purification. Other useful fusions include linking of functional domains, such as active sites from enzymes, glycosylation domains, cellular targeting signals or transmembrane regions.

[0118] 4. Purification of Proteins

[0119] It will be desirable to purify the novel polypeptide sequences of the present invention or variants thereof. Protein purification techniques are well known to those of skill in the art. These techniques involve, at one level, the crude fractionation of the cellular milieu to polypeptide and non-polypeptide fractions. Having separated the polypeptide from other proteins, the polypeptide of interest may be further purified using chromatographic and electrophoretic techniques to achieve partial or complete purification (or purification to homogeneity). Analytical methods particularly suited to the preparation of a pure peptide are ion-exchange chromatography, exclusion chromatography; polyacrylamide gel electrophoresis; isoelectric focusing. A particularly efficient method of purifying peptides is fast protein liquid chromatography or even HPLC.

[0120] Certain aspects of the present invention concern the purification, and in particular embodiments, the substantial purification, of an encoded protein or peptide. The term “purified protein or peptide” as used herein, is intended to refer to a composition, isolatable from other components, wherein the protein or peptide is purified to any degree relative to its naturally-obtainable state. A purified protein or peptide therefore also refers to a protein or peptide, free from the environment in which it may naturally occur.

[0121] Generally, “purified” will refer to a protein or peptide composition that has been subjected to fractionation to remove various other components, and which composition substantially retains its expressed biological activity. Where the term “substantially purified” is used, this designation will refer to a composition in which the protein or peptide forms the major component of the composition, such as constituting about 50%, about 60%, about 70%, about 80%, about 90%, about 95% or more of the proteins in the composition.

[0122] Various methods for quantifying the degree of purification of the protein or peptide will be known to those of skill in the art in light of the present disclosure. These include, for example, determining the specific activity of an active fraction, or assessing the amount of polypeptides within a fraction by SDS/PAGE analysis. A preferred method for assessing the purity of a fraction is to calculate the specific activity of the fraction, to compare it to the specific activity of the initial extract, and to thus calculate the degree of purity, herein assessed by a “-fold purification number.” The actual units used to represent the amount of activity will, of course, be dependent upon the particular assay technique chosen to follow the purification and whether or not the expressed protein or peptide exhibits a detectable activity.

[0123] Various techniques suitable for use in protein purification will be well known to those of skill in the art. These include, for example, precipitation with ammonium sulphate, PEG, antibodies and the like or by heat denaturation, followed by centrifugation; chromatography steps such as ion exchange, gel filtration, reverse phase, hydroxylapatite and affinity chromatography; isoelectric focusing; gel electrophoresis; and combinations of such and other techniques. As is generally known in the art, it is believed that the order of conducting the various purification steps may be changed, or that certain steps may be omitted, and still result in a suitable method for the preparation of a substantially purified protein or peptide.

[0124] There is no general requirement that the protein or peptide always be provided in their most purified state. Indeed, it is contemplated that less substantially purified products will have utility in certain embodiments. Partial purification may be accomplished by using fewer purification steps in combination, or by utilizing different forms of the same general purification scheme. For example, it is appreciated that a cation-exchange column chromatography performed utilizing an HPLC apparatus will generally result in a greater “-fold” purification than the same technique utilizing a low pressure chromatography system. Methods exhibiting a lower degree of relative purification may have advantages in total recovery of protein product, or in maintaining the activity of an expressed protein.

[0125] It is known that the migration of a polypeptide can vary, sometimes significantly, with different conditions of SDS/PAGE (Capaldi et al., 1977). It will therefore be appreciated that under differing electrophoresis conditions, the apparent molecular weights of purified or partially purified expression products may vary.

[0126] High Performance Liquid Chromatography (HPLC) is characterized by a very rapid separation with extraordinary resolution of peaks. This is achieved by the use of very fine particles and high pressure to maintain an adequate flow rate. Separation can be accomplished in a matter of minutes, or at most an hour. Moreover, only a very small volume of the sample is needed because the particles are so small and close-packed that the void volume is a very small fraction of the bed volume. Also, the concentration of the sample need not be very great because the bands are so narrow that there is very little dilution of the sample.

[0127] Gel chromatography, or molecular sieve chromatography, is a special type of partition chromatography that is based on molecular size. The theory behind gel chromatography is that the column, which is prepared with tiny particles of an inert substance that contain small pores, separates larger molecules from smaller molecules as they pass through or around the pores, depending on their size. As long as the material of which the particles are made does not adsorb the molecules, the sole factor determining rate of flow is the size. Hence, molecules are eluted from the column in decreasing size, so long as the shape is relatively constant. Gel chromatography is unsurpassed for separating molecules of different size because separation is independent of all other factors such as pH, ionic strength, temperature, etc. There also is virtually no adsorption, less zone spreading and the elution volume is related in a simple matter to molecular weight.

[0128] Affinity Chromatography is a chromatographic procedure that relies on the specific affinity between a substance to be isolated and a molecule that it can specifically bind to. This is a receptor-ligand type interaction. The column material is synthesized by covalently coupling one of the binding partners to an insoluble matrix. The column material is then able to specifically adsorb the substance from the solution. Elution occurs by changing the conditions to those in which binding will not occur (alter pH, ionic strength, temperature, etc.).

[0129] A particular type of affinity chromatography useful in the purification of carbohydrate containing compounds is lectin affinity chromatography. Lectins are a class of substances that bind to a variety of polysaccharides and glycoproteins. Lectins are usually coupled to agarose by cyanogen bromide. Conconavalin A coupled to Sepharose was the first material of this sort to be used and has been widely used in the isolation of polysaccharides and glycoproteins; other lectins that have been include lentil lectin and wheat germ agglutinin, which has been useful in the purification of N-acetyl glucosaminyl residues and Helix pomatia lectin. Lectins themselves are purified using affinity chromatography with carbohydrate ligands. Lactose has been used to purify lectins from castor bean and peanuts; maltose has been useful in extracting lectins from lentils and jack bean; N-acetyl-D galactosamine is used for purifying lectins from soybean; N-acetyl glucosaminyl binds to lectins from wheat germ; D-galactosamine has been used in obtaining lectins from clams and L-fucose will bind to lectins from lotus.

[0130] The matrix should be a substance that itself does not adsorb molecules to any significant extent and that has a broad range of chemical, physical and thermal stability. The ligand should be coupled in such a way as to not affect its binding properties. The ligand should also provide relatively tight binding. And it should be possible to elute the substance without destroying the sample or the ligand. One of the most common forms of affinity chromatography is immunoaffinity chromatography. The generation of antibodies that would be suitable for use in accord with the present invention is discussed below.

[0131] 5. Synthetic Peptides

[0132] As discussed above, the present invention encompasses peptides of the larger polypeptide sequences. Because of their relatively small size, the peptides of the invention can also be synthesized in solution or on a solid support in accordance with conventional techniques. Various automatic synthesizers are commercially available and can be used in accordance with known protocols. See, e.g., Stewart and Young (1984); Tam et al. (1983); Merrifield (1986); and Barany and Merrifield (1979), each incorporated herein by reference. Short peptide sequences, or libraries of overlapping peptides, usually from about 6 up to about 35 to 50 amino acids, which correspond to the selected regions described herein, can be readily synthesized and then screened in screening assays designed to identify reactive peptides. Alternatively, recombinant DNA technology may be employed wherein a nucleotide sequence which encodes a peptide of the invention is inserted into an expression vector, transformed or transfected into an appropriate host cell and cultivated under conditions suitable for expression.

[0133] 6. Antigen Compositions and Antibody Generation

[0134] The present invention also provides for the use of proteins, polypeptides, or peptides as antigens for the immunization of animals relating to the production of antibodies. It is proposed that the antibodies of the present invention will find useful application in standard immunochemical procedures, such as ELISA and Western blot methods and in immunohistochemical procedures such as tissue staining, as well as in other procedures which may utilize antibodies specific to antigen epitopes.

[0135] Thus, certain embodiments of the present invention pertain to a polyclonal antisera, antibodies of which bind immunologically to a polypeptide selected from the group consisting of SEQ ID NOS:2, 4, 6, 8, 10, 12, 14, 16, 18, 20, 22, 24, 26, 28-30, 32, 34, 36, 38, 40, 42, 44, 46, 48, 54, or 55. In other embodiments, the invention pertains to a monoclonal antibody that immunologically binds to a polypeptide selected from the group consisting of SEQ ID NOS:2, 4, 6, 8, 10, 12, 14, 16, 18, 20, 22, 24, 26, 28-30, 32, 34, 36, 38, 40, 42, 44, 46, 48, 54, or 55.

[0136] Polyclonal sera is prepared by immunizing an animal with an immunogen comprising a polypeptide of the present invention and collecting antisera from that immunized animal. A wide range of animal species can be used for the production of antisera. Typically an animal used for production of anti-antisera is a non-human animal including rabbits, mice, rats, hamsters, pigs or horses. Because of the relatively large blood volume of rabbits, a rabbit is a preferred choice for production of polyclonal antibodies.

[0137] As is well known in the art, a given composition may vary in its immunogenicity. It is often necessary therefore to boost the host immune system, as may be achieved by coupling a peptide or polypeptide immunogen to a carrier. Exemplary and preferred carriers are keyhole limpet hemocyanin (KLH) and bovine serum albumin (BSA). Other albumins such as ovalbumin, mouse serum albumin or rabbit serum albumin can also be used as carriers. Means for conjugating a polypeptide to a carrier protein are well known in the art and include glutaraldehyde, m-maleimidobencoyl-N-hydroxysuccinimide ester, carbodiimide and bis-biazotized benzidine.

[0138] It is envisioned that SEQ ID NOS:2, 4, 6, 8, 10, 12, 14, 16, 18, 20, 22, 24, 26, 28-30, 32, 34, 36, 38, 40, 42, 44, 46, 48, 54, or 55 or portions thereof, will be coupled, bonded, bound, conjugated or chemically-linked to one or more agents via linkers, polylinkers or derivatized amino acids. This may be performed such that a bispecific or multivalent composition or vaccine is produced. It is further envisioned that the methods used for administration to animals, i.e., pharmaceutically acceptable, will be familiar to those of skill in the art.

[0139] As also is well known in the art, the immunogenicity of a particular immunogen composition can be enhanced by the use of non-specific stimulators of the immune response, known as adjuvants. Exemplary and preferred adjuvants include complete Freund's adjuvant (a non-specific stimulator of the immune response containing killed Mycobacterium tuberculosis), incomplete Freund's adjuvants and aluminum hydroxide adjuvant.

[0140] The amount of immunogen composition used in the production of polyclonal antibodies varies upon the nature of the immunogen as well as the animal used for immunization. A variety of routes can be used to administer the immunogen (subcutaneous, intramuscular, intradermal, intravenous and intraperitoneal). The production of polyclonal antibodies may be monitored by sampling blood of the immunized animal at various points following immunization. A second, booster, injection may also be given. The process of boosting and titering is repeated until a suitable titer is achieved. When a desired level of immunogenicity is obtained, the immunized animal can be bled and the serum isolated and stored, and/or the animal can be used to generate mAbs.

[0141] MAbs may be readily prepared through use of well-known techniques, such as those exemplified in U.S. Pat. No. 4,196,265, incorporated herein by reference. Typically, this technique involves immunizing a suitable animal with a selected immunogen composition, e.g., a purified or partially purified protein, polypeptide or peptide. The immunizing composition is administered in a manner effective to stimulate antibody producing cells. Rodents such as mice and rats are preferred animals, however, the use of rabbit, sheep frog cells is also possible. The use of rats may provide certain advantages (Goding, 1986), but mice are preferred, with the BALB/c mouse being most preferred as this is most routinely used and generally gives a higher percentage of stable fusions.

[0142] Following immunization, somatic cells with the potential for producing antibodies, specifically B-lymphocytes (B-cells), are selected for use in the mAb generating protocol. These cells may be obtained from biopsied spleens, tonsils or lymph nodes, or from a peripheral blood sample. Spleen cells and peripheral blood cells are preferred, the former because they are a rich source of antibody-producing cells that are in the dividing plasmablast stage, and the latter because peripheral blood is easily accessible. Often, a panel of animals will have been immunized and the spleen of animal with the highest antibody titer will be removed and the spleen lymphocytes obtained by homogenizing the spleen with a syringe. Typically, a spleen from an immunized mouse contains approximately 5×10⁷ to 2×10⁸ lymphocytes.

[0143] The antibody-producing B lymphocytes from the immunized animal are then fused with cells of an immortal myeloma cell, generally one of the same species as the animal that was immunized. Myeloma cell lines suited for use in hybridoma-producing fusion procedures preferably are non-antibody-producing, have high fusion efficiency, and enzyme deficiencies that render then incapable of growing in certain selective media which support the growth of only the desired fused cells (hybridomas). Fusion procedures usually produce viable hybrids at low frequencies, around 1×10⁻⁶ to 1×10⁻⁸. However, this does not pose a problem, as the viable, fused hybrids are differentiated from the parental, unfused cells (particularly the unfused myeloma cells that would normally continue to divide indefinitely) by culturing in a selective medium.

[0144] Xelected hybridomas are serially diluted and cloned into individual antibody-producing cell lines, which clones can then be propagated indefinitely to provide mAbs. The cell lines may be exploited for mAb production in two basic ways. A sample of the hybridoma can be injected (often into the peritoneal cavity) into a histocompatible animal of the type that was used to provide the somatic and myeloma cells for the original fusion. The injected animal develops tumors secreting the specific monoclonal antibody produced by the fused cell hybrid. The body fluids of the animal, such as serum or ascites fluid, can then be tapped to provide mAbs in high concentration. The individual cell lines could also be cultured in vitro, where the mAbs are naturally secreted into the culture medium from which they can be readily obtained in high concentrations. mAbs produced by either means may be further purified, if desired, using filtration, centrifugation and various chromatographic methods such as HPLC or affinity chromatography.

[0145] In general, both polyclonal and monoclonal antibodies against the novel polypeptide sequences of the present invention may be used in a variety of embodiments. For example, they may be employed in antibody cloning protocols to obtain cDNAs or genes encoding other polypeptides associated with sleep regulation. They may also be used in inhibition studies to analyze the effects of related peptides in cells or animals. The antibodies of the present invention will also be useful in immunolocalization studies to analyze the distribution of SEQ ID NOS:2, 4, 6, 8, 10, 12, 14, 16, 18, 20, 22, 24, 26, 28-30, 32, 34, 36, 38, 40, 42, 44, 46, 48, 54, or 55 during various cellular events, for example, to determine the cellular or tissue-specific distribution of these polypeptides under different points in the cell cycle. A particularly useful application of such antibodies is in purifying native or recombinant polypeptides, for example, using an antibody affinity column. The operation of all such immunological techniques will be known to those of skill in the art in light of the present disclosure.

C. Nucleic Acids

[0146] The present invention also provides, in certain embodiments, isolated and purified nucleic acids that include a segment encoding a polypeptide selected from the group consisting of SEQ ID NOS: 1, 3, 5, 7, 9, 11, 13, 15, 17, 19, 21, 23, 25, 27, 31, 33, 35, 37, 39, 41, 43, 45, 47 and 53. In other embodiments, the invention provides for isolated and purified oligonucleotides of no more than about 50 nucleotides in length that include a segment of 15 or more consecutive bases from a polynucleotide selected from the group consisting of SEQ ID NOS: 1, 3, 5, 7, 9, 11, 13, 15, 17, 19, 21, 23, 25, 27, 31, 33, 35, 37, 39, 41, 43, 45, 47 and 53. The present invention is not limited in scope to these nucleic acids, however, as one of ordinary skill in the could, using these nucleic acids, readily identify related homologs in these and various other species (e.g., rat, rabbit, dog, monkey, gibbon, human, chimp, ape, baboon, cow, pig, horse, sheep, cat and other species).

[0147] The invention discloses specific polynucleotide sequences. It should be clear that the present invention is not limited to the specific nucleic acids disclosed herein. As discussed below, an equivalent polynucleotide may contain a variety of different bases and yet still produce a corresponding polypeptide that is functionally indistinguishable, and in some cases structurally, from the human and mouse genes disclosed herein.

[0148] Similarly, any reference to a nucleic acid should be read as encompassing a host cell containing that nucleic acid and, in some cases, capable of expressing the product of that nucleic acid. Cells comprising nucleic acids of the present invention may prove useful in the context of screening for agents that induce, repress, inhibit, augment, interfere with, block, abrogate, stimulate or enhance sleep or sleep response.

[0149] 1. Nucleic Acids Encoding Novel Polypeptide Sequences

[0150] Nucleic acids according to the present invention may encode the entirety of SEQ ID NOS: 1, 3, 5, 7, 9, 11, 13, 15, 17, 19, 21, 23, 25, 27, 31, 33, 35, 37, 39, 41, 43, 45, 47 and 53 a domain of one of these sequences, or any other fragment of one of these sequences as set forth herein.

[0151] The nucleic acid may be derived from genomic DNA, i.e., cloned directly from the genome of a particular organism. In preferred embodiments, however, the nucleic acid would comprise complementary DNA (cDNA). Also contemplated is a cDNA plus a natural intron or an intron derived from another gene; such engineered molecules are sometime referred to as “mini-genes.” At a minimum, these and other nucleic acids of the present invention may be used as molecular weight standards in, for example, gel electrophoresis.

[0152] The term “cDNA” is intended to refer to DNA prepared using messenger RNA (mRNA) as template. The advantage of using a cDNA, as opposed to genomic DNA or DNA polymerized from a genomic, non- or partially-processed RNA template, is that the cDNA primarily contains coding sequences of the corresponding protein. There may be times when the full or partial genomic sequence is preferred, such as where the non-coding regions are required for optimal expression or where non-coding regions such as introns are to be targeted in an antisense strategy.

[0153] It also is contemplated that a given sequence from a given species may be represented by natural variants that have slightly different nucleic acid sequences but, nonetheless, encode the same protein (see Table 1 below).

[0154] As used in this application, the term “an isolated and purified nucleic acid” refers to a nucleic acid molecule that has been isolated free of total cellular nucleic acid. In preferred embodiments, the invention concerns a nucleic acid sequence essentially as set forth in SEQ ID NOS: 1, 3, 5, 7, 9, 11, 13, 15, 17, 19, 21, 23, 25, 27, 31, 33, 35, 37, 39, 41, 43, 45, 47 and 53. The term “as set forth in SEQ ID NOS: 1, 3, 5, 7, 9, 11, 13, 15, 17, 19, 21, 23, 25, 27, 31, 33, 35, 37, 39, 41, 43, 45, 47 and 53” means that the nucleic acid sequence substantially corresponds to a portion of SEQ ID NOS: 1, 3, 5, 7, 9, 11, 13, 15, 17, 19, 21, 23, 25, 27, 31, 33, 35, 37, 39, 41, 43, 45, 47 and 53. The term “functionally equivalent codon” is used herein to refer to codons that encode the same amino acid, such as the six codons for arginine or serine (TABLE 2, below), and also refers to codons that encode biologically equivalent amino acids, as discussed in the following pages.

TABLE 2

| | |
|---|---|
| Amino Acids | Codons |

| | | | |
|---|---|---|---|
| Alanine | Ala | A | GCA GCC GCG GCU |
| Cysteine | Cys | C | UGC UGU |
| Aspartic acid | Asp | D | GAC GAU |
| Glutamic acid | Glu | E | GAA GAG |
| Phenylalanine | Phe | F | UUC UUU |
| Glycine | Gly | G | GGA GGC GGG GGU |
| Histidine | His | H | CAC CAU |
| Isoleucine | Ile | I | AUA AUC AUU |
| Lysine | Lys | K | AAA AAG |
| Leucine | Leu | L | UUA UUG CUA CUC CUG CUU |
| Methionine | Met | M | AUG |
| Asparagine | Asn | N | AAC AAU |
| Proline | Pro | P | CCA CCC CCG CCU |
| Glutamine | Gln | Q | CAA CAG |
| Arginine | Arg | R | AGA AGG CGA CGC CGG CGU |
| Serine | Ser | S | AGC AGU UCA UCC UCG UCU |
| Threonine | Thr | T | ACA ACC ACG ACU |
| Valine | Val | V | GUA GUC GUG GUU |
| Tryptophan | Trp | W | UGG |
| Tyrosine | Tyr | Y | UAC UAU |

Allowing for the degeneracy of the genetic code, sequences that have at least about 50%, usually at least about 60%, more usually about 70%, most usually about 80%, preferably at least about 90% and most preferably about 95% of nucleotides that are identical to the nucleotides of SEQ ID NOS: 1, 3, 5, 7, 9, 11, 13, 15, 17, 19, 21, 23, 25, 27, 31, 33, 35, 37, 39, 41, 43, 45, 47 and 53 are contemplated. Sequences that are essentially the same as those set forth in SEQ ID NOS: 1, 3, 5, 7, 9, 11, 13, 15, 17, 19, 21, 23, 25, 27, 31, 33, 35, 37, 39, 41, 43, 45, 47 and 53 may also be functionally defined as sequences that are capable of hybridizing to a nucleic acid segment containing the complement of SEQ ID NOS: 1, 3, 5, 7, 9, 11, 13, 15, 17, 19, 21, 23, 25, 27, 31, 33, 35, 37, 39, 41, 43, 45, 47 and 53 under standard conditions.

[0155] The DNA segments of the present invention include those encoding biologically functional equivalent proteins and peptides, as described above. Such sequences may arise as a consequence of codon redundancy and amino acid functional equivalency that are known to occur naturally within nucleic acid sequences and the proteins thus encoded. Alternatively, functionally equivalent proteins or peptides may be created via the application of recombinant DNA technology, in which changes in the protein structure may be engineered, based on considerations of the properties of the amino acids being exchanged. Changes designed by man may be introduced through the application of site-directed mutagenesis techniques or may be introduced randomly and screened later for the desired function, as described below.

[0156] 2. Oligonucleotide Probes and Primers

[0157] Naturally, the present invention also encompasses DNA segments that are complementary, or essentially complementary, to the sequence set forth in SEQ ID NOS: 1, 3, 5, 7, 9, 11, 13, 15, 17, 19, 21, 23, 25, 27, 31, 33, 35, 37, 39, 41, 43, 45, 47 and 53. Nucleic acid sequences that are “complementary” are those that are capable of base-pairing according to the standard Watson-Crick complementary rules. As used herein, the term “complementary sequences” means nucleic acid sequences that are substantially complementary, as may be assessed by the same nucleotide comparison set forth above, or as defined as being capable of hybridizing to the nucleic acid segment of SEQ ID NOS: 1, 3, 5, 7, 9, 11, 13, 15, 17, 19, 21, 23, 25, 27, 31, 33, 35, 37, 39, 41, 43, 45, 47 and 53 under relatively stringent conditions such as those described herein. Such sequences may encode entire proteins corresponding to SEQ ID NOS: 1, 3, 5, 7, 9, 11, 13, 15, 17, 19, 21, 23, 25, 27, 31, 33, 35, 37, 39, 41, 43, 45, 47 and 53 or functional or non-functional fragments thereof.

[0158] Alternatively, the hybridizing segments may be shorter oligonucleotides. Sequences of 17 bases long should occur only once in the human genome and, therefore, suffice to specify a unique target sequence. Although shorter oligomers are easier to make and increase in vivo accessibility, numerous other factors are involved in determining the specificity of hybridization. Both binding affinity and sequence specificity of an oligonucleotide to its complementary target increases with increasing length. It is contemplated that exemplary oligonucleotides of 8, 9, 10, 11, 12, 13, 14, 15, 16, 17, 18, 19, 20, 25, 30, 35, 40, 45, 50, 55, 60, 65, 70, 75, 80, 85, 90, 95, 100 or more base pairs will be used, although others are contemplated. Longer polynucleotides encoding 250, 500, 1000, 1212, 1500, 2000, 2500, 3000 or 5000 bases and longer are contemplated as well. Such oligonucleotides will find use, for example, as probes in Southern and Northern blots and as primers in amplification reactions.

[0159] Suitable hybridization conditions will be well known to those of skill in the art. In certain applications, for example, substitution of amino acids by site-directed mutagenesis, it is appreciated that lower stringency conditions are required. Under these conditions, hybridization may occur even though the sequences of probe and target strand are not perfectly complementary, but are mismatched at one or more positions. Conditions may be rendered less stringent by increasing salt concentration and decreasing temperature. For example, a medium stringency condition could be provided by about 0.1 to 0.25 M NaCl at temperatures of about 37° C. to about 55° C., while a low stringency condition could be provided by about 0.15 M to about 0.9 M salt, at temperatures ranging from about 20° C. to about 55° C. Thus, hybridization conditions can be readily manipulated, and thus will generally be a method of choice depending on the desired results.

[0160] In other embodiments, hybridization may be achieved under conditions of, for example, 50 mM Tris-HCl (pH 8.3), 75 mM KCl, 3 mM MgCl₂, 10 mM dithiothreitol, at temperatures between approximately 20° C. to about 37° C. Other hybridization conditions utilized could include approximately 10 mM Tris-HCl (pH 8.3), 50 mM KCl, 1.5 μM MgCl₂, at temperatures ranging from approximately 40° C. to about 72° C. Formamide and SDS also may be used to alter the hybridization conditions.

[0161] One method of using probes and primers of the present invention is in the search for nucleic acids related to SEQ ID NOS: 1, 3, 5, 7, 9, 11, 13, 15, 17, 19, 21, 23, 25, 27, 31, 33, 35, 37, 39, 41, 43, 45, 47 and 53 or, more particularly, homologs of these sequences from other species. Normally, the target DNA will be a genomic or cDNA library, although screening may involve analysis of RNA molecules. By varying the stringency of hybridization, and the region of the probe, different degrees of homology may be discovered.

[0162] Another way of exploiting probes and primers of the present invention is in s site-directed, or site-specific mutagenesis. Site-specific mutagenesis is a technique useful in the preparation of individual peptides, or biologically functional equivalent proteins or peptides, through specific mutagenesis of the underlying DNA. The technique further provides a ready ability to prepare and test sequence variants, incorporating one or more of the foregoing considerations, by introducing one or more nucleotide sequence changes into the DNA. Site-specific mutagenesis allows the production of mutants through the use of specific oligonucleotide sequences which encode the DNA sequence of the desired mutation, as well as a sufficient number of adjacent nucleotides, to provide a primer sequence of sufficient size and sequence complexity to form a stable duplex on both sides of the deletion junction being traversed. Typically, a primer of about 17 to 25 nucleotides in length is preferred, with about 5 to 10 residues on both sides of the junction of the sequence being altered.

[0163] The technique typically employs a bacteriophage vector that exists in both a single-stranded and double-stranded form. Typical vectors useful in site-directed mutagenesis include vectors such as the M13 phage. These phage vectors are commercially available and their use is generally well known to those skilled in the art. Double-stranded plasmids are also routinely employed in site directed mutagenesis, which eliminates the step of transferring the gene of interest from a phage to a plasmid.

[0164] In general, site-directed mutagenesis is performed by first obtaining a single-stranded vector, or melting of two strands of a double-stranded vector which includes within its sequence a DNA sequence encoding the desired protein. An oligonucleotide primer bearing the desired mutated sequence is synthetically prepared. This primer is then annealed with the single-stranded DNA preparation, taking into account the degree of mismatch when selecting hybridization conditions, and subjected to DNA polymerizing enzymes such as E. coli polymerase I Klenow fragment, in order to complete the synthesis of the mutation-bearing strand. Thus, a heteroduplex is formed wherein one strand encodes the original non-mutated sequence and the second strand bears the desired mutation. This heteroduplex vector is then used to transform appropriate cells, such as E. coli cells, and clones are selected that include recombinant vectors bearing the mutated sequence arrangement.

[0165] The preparation of sequence variants of the selected gene using site-directed mutagenesis is provided as a means of producing potentially useful species and is not meant to be limiting, as there are other ways in which sequence variants of genes may be obtained. For example, recombinant vectors encoding the desired gene may be treated with mutagenic agents, such as hydroxylamine, to obtain sequence variants.

[0166] 3. Antisense Constructs

[0167] Antisense methodology takes advantage of the fact that nucleic acids tend to pair with “complementary” sequences. By complementary, it is meant that polynucleotides are those which are capable of base-pairing according to the standard Watson-Crick complementarity rules. That is, the larger purines will base pair with the smaller pyrimidines to form combinations of guanine paired with cytosine (G:C) and adenine paired with either thymine (A:T) in the case of DNA, or adenine paired with uracil (A:U) in the case of RNA. Inclusion of less common bases such as inosine, 5-methylcytosine, 6-methyladenine, hypoxanthine and others in hybridizing sequences does not interfere with pairing.

[0168] Targeting double-stranded (ds) DNA with polynucleotides leads to triple-helix formation; targeting RNA will lead to double-helix formation. Antisense polynucleotides, when introduced into a target cell, specifically bind to their target polynucleotide and interfere with transcription, RNA processing, transport, translation and/or stability. Antisense RNA constructs, or DNA encoding such antisense RNA's, may be employed to inhibit gene transcription or translation or both within a host cell, either in vitro or in vivo, such as within a host animal, including a human subject.

[0169] Antisense constructs may be designed to bind to the promoter and other control regions, exons, introns or even exon-intron boundaries of a gene. It is contemplated that the most effective antisense constructs will include regions complementary to intron/exon splice junctions. Thus, it is proposed that a preferred embodiment includes an antisense construct with complementarity to regions within 50-200 bases of an intron-exon splice junction. It has been observed that some exon sequences can be included in the construct without seriously affecting the target selectivity thereof. The amount of exonic material included will vary depending on the particular exon and intron sequences used. One can readily test whether too much exon DNA is included simply by testing the constructs in vitro to determine whether normal cellular function is affected or whether the expression of related genes having complementary sequences is affected.

[0170] As stated above, “complementary” or “antisense” means polynucleotide sequences that are substantially complementary over their entire length and have very few base mismatches. For example, sequences of fifteen bases in length may be termed complementary when they have complementary nucleotides at thirteen or fourteen positions. Naturally, sequences which are completely complementary will be sequences which are entirely complementary throughout their entire length and have no base mismatches. Other sequences with lower degrees of homology also are contemplated. For example, an antisense construct which has limited regions of high homology, but also contains a non-homologous region (e.g., ribozyme; see below) could be designed. These molecules, though having less than 50% homology, would bind to target sequences under appropriate conditions.

[0171] It may be advantageous to combine portions of genomic DNA with cDNA or synthetic sequences to generate specific constructs. For example, where an intron is desired in the ultimate construct, a genomic clone will need to be used. The cDNA or a synthesized polynucleotide may provide more convenient restriction sites for the remaining portion of the construct and, therefore, would be used for the rest of the sequence.

[0172] 4. Ribozymes

[0173] Although proteins traditionally have been used for catalysis of nucleic acids, another class of macromolecules has emerged as useful in this endeavor. Ribozymes are RNA-protein complexes that cleave nucleic acids in a site-specific fashion. Ribozymes have specific catalytic domains that possess endonuclease activity (Kim and Cook, 1987; Gerlach et al., 1987; Forster and Symons, 1987). For example, a large number of ribozymes accelerate phosphoester transfer reactions with a high degree of specificity, often cleaving only one of several phosphoesters in an oligonucleotide substrate (Michel and Westhof, 1990; Reinhold-Hurek and Shub, 1992). This specificity has been attributed to the requirement that the substrate bind via specific base-pairing interactions to the internal guide sequence (“IGS”) of the ribozyme prior to chemical reaction.

[0174] Ribozyme catalysis has primarily been observed as part of sequence-specific cleavage/ligation reactions involving nucleic acids (Joyce, 1989). For example, U.S. Pat. No. 5,354,855 reports that certain ribozymes can act as endonucleases with a sequence specificity greater than that of known ribonucleases and approaching that of the DNA restriction enzymes. Thus, sequence-specific ribozyme-mediated inhibition of gene expression may be particularly suited to therapeutic applications (Scanlon et al., 1991; Sarver et al., 1990). Recently, it was reported that ribozymes elicited genetic changes in some cells lines to which they were applied; the altered genes included the oncogenes H-ras, c-fos and genes of HIV. Most of this work involved the modification of a target mRNA, based on a specific mutant codon that is cleaved by a specific ribozyme.

[0175] 5. RNA and RNA Interference

[0176] In certain embodiments, the nucleic acid is an RNA molecule. For example, the RNA molecule can be a messenger RNA (mRNA) molecule. In other embodiments, the RNA molecule is an interfering RNA. RNA interference (RNA₁) is a form of gene silencing triggered by double-stranded RNA (dsRNA). DsRNA activates post-transcriptional gene expression surveillance mechanisms that appear to function to defend cells from virus infection and transposon activity. Fire et al. (1998); Grishok et al. (2000); Ketting et al. (1999); Lin & Avery (1999); Montgomery et al. (1998); Sharp (1999); Sharp & Zamore (2000); Tabara et al. (1999). Activation of these mechanisms targets mature, dsRNA-complementary mRNA for destruction. RNAᵢ offers major experimental advantages for study of gene function. These advantages include a very high specificity, ease of movement across cell membranes, and prolonged down-regulation of the targeted gene. Fire et al. (1998); Grishok et al. (2000); Ketting et al. (1999); Lin & Avery (1999); Montgomery et al. (1998); Sharp (1999); Sharp & Zamore (2000); Tabara et al. (1999). RNAᵢ also is incredibly potent. It has been estimated that only a few copies of dsRNA are required to knock down >95% of targeted gene expression in a cell. Fire et al. (1998). Moreover, dsRNA has been shown to silence genes in a wide range of systems, including plants, protozoans, C. elegans and Drosophila. Grishok et al. (2000); Sharp (1999); Sharp & Zamore (1999).

D. Vectors for Cloning, Gene Transfer and Expression

[0177] Within certain embodiments, expression vectors are employed to express a polypeptide selected from the group consisting of SEQ ID NOS: 1, 3, 5, 7, 9, 11, 13, 15, 17, 19, 21, 23, 25, 27, 31, 33, 35, 37, 39, 41, 43, 45, and 47. In other embodiments, the expression vectors are used in gene therapy. Expression requires that appropriate signals be provided in the vectors, and which include various regulatory elements, such as enhancers/promoters from both viral and mammalian sources that drive expression of the genes of interest in host cells. Elements designed to optimize messenger RNA stability and translatability in host cells also are defined. The conditions for the use of a number of dominant drug selection markers for establishing permanent, stable cell clones expressing the products are also provided, as is an element that links expression of the drug selection markers to expression of the polypeptide.

[0178] 1. Regulatory Elements

[0179] Throughout this application, the term “expression construct” is meant to include any type of genetic construct containing a nucleic acid coding for a gene product in which part or all of the nucleic acid encoding sequence is capable of being transcribed. The transcript may be translated into a protein, but it need not be. In certain embodiments, expression includes both transcription of a gene and translation of mRNA into a gene product. In other embodiments, expression only includes transcription of the nucleic acid encoding a gene of interest.

[0180] In preferred embodiments, the nucleic acid encoding a gene product is under transcriptional control of a promoter. A “promoter” refers to a DNA sequence recognized by the synthetic machinery of the cell, or introduced synthetic machinery, required to initiate the specific transcription of a gene. The phrase “under transcriptional control” means that the promoter is in the correct location and orientation in relation to the nucleic acid to control RNA polymerase initiation and expression of the gene.

[0181] The term promoter will be used here to refer to a group of transcriptional control modules that are clustered around the initiation site for RNA polymerase II. Much of the thinking about how promoters are organized derives from analyses of several viral promoters, including those for the HSV thymidine kinase (tk) and SV40 early transcription units. These studies, augmented by more recent work, have shown that promoters are composed of discrete functional modules, each consisting of approximately 7-20 bp of DNA, and containing one or more recognition sites for transcriptional activator or repressor proteins.

[0182] At least one module in each promoter functions to position the start site for RNA synthesis. The best known example of this is the TATA box, but in some promoters lacking a TATA box, such as the promoter for the mammalian terminal deoxynucleotidyl transferase gene and the promoter for the SV40 late genes, a discrete element overlying the start site itself helps to fix the place of initiation.

[0183] Additional promoter elements regulate the frequency of transcriptional initiation. Typically, these are located in the region 30-110 bp upstream of the start site, although a number of promoters have recently been shown to contain functional elements downstream of the start site as well. The spacing between promoter elements frequently is flexible, so that promoter function is preserved when elements are inverted or moved relative to one another. In the tk promoter, the spacing between promoter elements can be increased to 50 bp apart before activity begins to decline. Depending on the promoter, it appears that individual elements can function either co-operatively or independently to activate transcription.

[0184] In various embodiments, the human cytomegalovirus (CMV) immediate early gene promoter, the SV40 early promoter, the Rous sarcoma virus long terminal repeat, rat insulin promoter and glyceraldehyde-3-phosphate dehydrogenase can be used to obtain high-level expression of the coding sequence of interest. The use of other viral or mammalian cellular or bacterial phage promoters which are well-known in the art to achieve expression of a coding sequence of interest is contemplated as well, provided that the levels of expression are sufficient for a given purpose.

[0185] By employing a promoter with well-known properties, the level and pattern of expression of the protein of interest following transfection or transformation can be optimized. Further, selection of a promoter that is regulated in response to specific physiologic signals can permit inducible expression of the gene product. Tables 2 and 3 list several regulatory elements that may be employed, in the context of the present invention, to regulate the expression of the gene of interest. This list is not intended to be exhaustive of all the possible elements involved in the promotion of gene expression but, merely, to be exemplary thereof.

[0186] Enhancers are genetic elements that increase transcription from a promoter located at a distant position on the same molecule of DNA. Enhancers are organized much like promoters. That is, they are composed of many individual elements, each of which binds to one or more transcriptional proteins.

[0187] The basic distinction between enhancers and promoters is operational. An enhancer region as a whole must be able to stimulate transcription at a distance; this need not be true of a promoter region or its component elements. On the other hand, a promoter must have one or more elements that direct initiation of RNA synthesis at a particular site and in a particular orientation, whereas enhancers lack these specificities. Promoters and enhancers are often overlapping and contiguous, often seeming to have a very similar modular organization.

[0188] Below is a list of viral promoters, cellular promoters/enhancers and inducible promoters/enhancers that could be used in combination with the nucleic acid encoding a gene of interest in an expression construct (Table 2 and Table 3). Additionally, any other promoter/enhancer combination (for example, as per the Eukaryotic Promoter Data Base EPDB) could also be used to drive expression of the gene. Eukaryotic cells can support cytoplasmic transcription from certain bacterial promoters if the appropriate bacterial polymerase is provided, either as part of the delivery complex or as an additional genetic expression construct.

TABLE 3
Promoter and/or Enhancer

| Promoter/Enhancer | References |
|---|---|
| Immunoglobulin Heavy Chain | Banerji et al., 1983; Gilles et al., 1983; Grosschedl |
| | et al., 1985; Atchinson et al., 1986, 1987; Imler et |
| | al., 1987; Weinberger et al., 1984; Kiledjian et al., |
| | 1988; Porton et al.; 1990 |
| Immunoglobulin Light Chain | Queen et al., 1983; Picard et al., 1984 |
| T-Cell Receptor | Luria et al., 1987; Winoto et al., 1989; Redondo et |
| | al.; 1990 |
| HLA DQ a and/or DQ β | Sullivan et al., 1987 |
| β-Interferon | Goodbourn et al., 1986; Fujita et al., 1987; |
| | Goodbourn et al., 1988 |
| Interleukin-2 | Greene et al., 1989 |
| Interleukin-2 Receptor | Greene et al., 1989; Lin et al., 1990 |
| MHC Class II 5 | Koch et al., 1989 |
| MHC Class II HLA-DRa | Sherman et al., 1989 |
| β-Actin | Kawamoto et al., 1988; Ng et al.; 1989 |
| Muscle Creatine Kinase (MCK) | Jaynes et al., 1988; Horlick et al., 1989; Johnson et |
| | al., 1989 |
| Prealbumin (Transthyretin) | Costa et al., 1988 |
| Elastase I | Ornitz et al., 1987 |
| Metallothionein (MTII) | Karin et al., 1987; Culotta et al, 1989 |
| Collagenase | Pinkert et al., 1987; Angel et al., 1987a |
| Albumin | Pinkert et al., 1987; Tronche et al., 1989, 1990 |
| α-Fetoprotein | Godbout et al., 1988; Campere et al., 1989 |
| t-Globin | Bodine et al., 1987; Perez-Stable et al., 1990 |
| β-Globin | Trudel et al., 1987 |
| c-fos | Cohen et al., 1987 |
| c-HA-ras | Triesman, 1986; Deschamps et al., 1985 |
| Insulin | Edlund et al., 1985 |
| Neural Cell Adhesion Molecule | Hirsh et al., 1990 |
| (NCAM) | |
| α₁-Antitrypain | Latimer et al., 1990 |
| H2B (TH2B) Histone | Hwang et al., 1990 |
| Mouse and/or Type I Collagen | Ripe et al., 1989 |
| Glucose-Regulated Proteins | Chang et al., 1989 |
| (GRP94 and GRP78) | |
| Rat Growth Hormone | Larsen et al., 1986 |
| Human Serum Amyloid A (SAA) | Edbrooke et al., 1989 |
| Troponin I (TN I) | Yutzey et al., 1989 |
| Platelet-Derived Growth Factor | Pech et al., 1989 |
| (PDGF) | |
| Duchenne Muscular Dystrophy | Klamut et al., 1990 |
| SV40 | Banerji et al., 1981; Moreau et al., 1981; Sleigh et |
| | al., 1985; Firak et al., 1986; Herr et al., 1986; |
| | Imbra et al., 1986; Kadesch et al., 1986; Wang et |
| | al., 1986; Ondek et al., 1987; Kuhl et al., 1987; |
| | Schaffner et al., 1988 |
| Polyoma | Swartzendruber et al., 1975; Vasseur et al., 1980; |
| | Katinka et al., 1980, 1981; Tyndell et al., 1981; |
| | Dandolo et al., 1983; de Villiers et al., 1984; Hen |
| | et al., 1986; Satake et al., 1988; Campbell and/or |
| | Villarreal, 1988 |
| Retroviruses | Kriegler et al., 1982, 1983; Levinson et al., 1982; |
| | Kriegler et al., 1983, 1984a, b, 1988; Bosze et al., |
| | 1986; Miksicek et al., 1986; Celander et al., 1987; |
| | Thiesen et al., 1988; Celander et al., 1988; Choi et |
| | al., 1988; Reisman et al., 1989 |
| Papilloma Virus | Campo et al., 1983; Lusky et al., 1983; Spandidos |
| | and/or Wilkie, 1983; Spalholz et al., 1985; Lusky |
| | et al., 1986; Cripe et al., 1987; Gloss et al., 1987; |
| | Hirochika et al., 1987; Stephens et al., 1987; Glue |
| | et al., 1988 |
| Hepatitis B Virus | Bulla et al., 1986; Jameel et al., 1986; Shaul et al., |
| | 1987; Spandau et al., 1988; Vannice et al, 1988 |
| Human Immunodeficiency Virus | Muesing et al., 1987; Hauber et al., 1988; |
| | Jakobovits et al., 1988; Feng et al., 1988; Takebe |
| | et al., 1988; Rosen et al., 1988; Berkhout et al., |
| | 1989; Laspia et al., 1989; Sharp et al., 1989; |
| | Braddock et al., 1989 |
| Cytomegalovirus (CMV) | Weber et al., 1984; Boshart et al., 1985; Foecking |
| | et al., 1986 |
| Gibbon Ape Leukemia Virus | Holbrook et al., 1987; Quinn et al., 1989 |

[0189] TABLE 4
Inducible Elements

| Element | Inducer | References |
|---|---|---|
| MT II | Phorbol Ester (TFA) | Palmiter et al., 1982; |
| | Heavy metals | Haslinger et al., 1985; |
| | | Searle et al., 1985; Stuart |
| | | et al., 1985; Imagawa et |
| | | al., 1987, Karin et al., |
| | | 1987; Angel et al., 1987b; |
| | | McNeall et al., 1989 |
| MMTV (mouse | Glucocorticoids | Huang et al., 1991; Lee et |
| mammary tumor | | al., 1981; Majors et al., |
| virus) | | 1983; Chandler et al., |
| | | 1983; Lee et al., 1984; |
| | | Ponta et al., 1985; Sakai et |
| | | al., 1988 |
| β-Interferon | poly(rI)x | Tavernier et al., 1983 |
| | poly(rc) | |
| Adenovirus 5 E2 | ElA | Imperiale et al., 1984 |
| Collagenase | Phorbol Ester (TPA) | Angel et al., 1987a |
| Stromelysin | Phorbol Ester (TPA) | Angel et al., 1987b |
| SV40 | Phorbol Ester (TPA) | Angel et al., 1987b |
| Murine MX Gene | Interferon, Newcastle | Hug et al., 1988 |
| | Disease Virus | |
| GRP78 Gene | A23187 | Resendez et al., 1988 |
| α-2-Macroglobulin | IL-6 | Kunz et al., 1989 |
| Vimentin | Serum | Rittling et al., 1989 |
| MHC Class I | Interferon | Blanar et al., 1989 |
| Gene H-2 κb | | |
| HSP70 | ElA, SV40 Large T | Taylor et al., 1989, 1990a, |
| | Antigen | 1990b |
| Proliferin | Phorbol Ester-TPA | Mordacq et al., 1989 |
| Tumor Necrosis | PMA | Hensel et al., 1989 |
| Factor | | |
| Thyroid Stimulating | Thyroid Hormone | Chatterjee et al., 1989 |
| Hormone α Gene | | |

[0190] Where a cDNA insert is employed, one will typically desire to include a polyadenylation signal to effect proper polyadenylation of the gene transcript. The nature of the polyadenylation signal is not believed to be crucial to the successful practice of the invention, and any such sequence may be employed such as human growth hormone and SV40 polyadenylation signals. Also contemplated as an element of the expression cassette is a terminator. These elements can serve to enhance message levels and to minimize read through from the cassette into other sequences.

[0191] 2. Selectable Markers

[0192] In certain embodiments of the invention, the cells contain nucleic acid constructs of the present invention, a cell may be identified in vitro or in vivo by including a marker in the expression construct. Such markers would confer an identifiable change to the cell permitting easy identification of cells containing the expression construct. Usually the inclusion of a drug selection marker aids in cloning and in the selection of transformants, for example, genes that confer resistance to neomycin, puromycin, hygromycin, DHFR, GPT, zeocin and histidinol are useful selectable markers. Alternatively, enzymes such as herpes simplex virus thymidine kinase (tk) or chloramphenicol acetyltransferase (CAT) may be employed. Immunologic markers also can be employed. The selectable marker employed is not believed to be important, so long as it is capable of being expressed simultaneously with the nucleic acid encoding a gene product. Further examples of selectable markers are well known to one of skill in the art.

[0193] 3. Multigene Constructs and IRES

[0194] In certain embodiments of the invention, the use of internal ribosome binding sites (IRES) elements are used to create multigene, or polycistronic, messages. IRES elements are able to bypass the ribosome scanning model of 5′ methylated Cap dependent translation and begin translation at internal sites (Pelletier and Sonenberg, 1988). IRES elements from two members of the picornaovirus family (polio and encephalomyocarditis) have been described (Pelletier and Sonenberg, 1988), as well an IRES from a mammalian message (Macejak and Sarnow, 1991). IRES elements can be linked to heterologous open reading frames. Multiple open reading frames can be transcribed together, each separated by an IRES, creating polycistronic messages. By virtue of the IRES element, each open reading frame is accessible to ribosomes for efficient translation. Multiple genes can be efficiently expressed using a single promoter/enhancer to transcribe a single message.

[0195] Any heterologous open reading frame can be linked to IRES elements. This includes genes for secreted proteins, multi-subunit proteins, encoded by independent genes, intracellular or membrane-bound proteins and selectable markers. In this way, expression of several proteins can be simultaneously engineered into a cell with a single construct and a single selectable marker.

[0196] 4. Gene Transfer

[0197] There are a number of ways in which nucleic acids may be introduced into cells. In certain embodiments of the invention, a vector (also referred to herein as a gene delivery vector) is employed to deliver the expression construct. By way of illustration, in some embodiments, a vector may comprises a virus or a non-viral engineered construct derived.

[0198] Viral Gene Transfer.

[0199] The ability of certain viruses to enter cells via receptor-mediated endocytosis, to integrate into host cell genome and express viral genes stably and efficiently have made them attractive candidates for the transfer of foreign genes into mammalian cells (Ridgeway, 1988; Nicolas and Rubenstein, 1988; Baichwal and Sugden, 1986; Temin, 1986). The first viruses used as gene delivery vectors were DNA viruses including the papovaviruses (simian virus 40, bovine papilloma virus, and polyoma) (Ridgeway, 1988; Baichwal and Sugden, 1986). Generally, these have a relatively low capacity for foreign DNA sequences and have a restricted host spectrum. They can accommodate only up to 8 kb of foreign genetic material but can be readily introduced in a variety of cell lines and laboratory animals (Nicolas and Rubenstein, 1988; Temin, 1986). Where viral vectors are employed to deliver the gene or genes of interest, it is generally preferred that they be replication-defective, for example as known to those of skill in the art and as described further herein below.

[0200] One of the preferred methods for in vivo delivery of expression constructs involves the use of an adenovirus expression vector. “Adenovirus expression vector” is meant to include those constructs containing adenovirus sequences sufficient to (a) support packaging of the construct and (b) to express a polynucleotide that has been cloned therein. In this context, expression does not require that the gene product be synthesized.

[0201] In preferred embodiments, the expression vector comprises a genetically engineered form of adenovirus. Knowledge of the genetic organization of adenovirus, a 36 kb, linear, double-stranded DNA virus, allows substitution of large pieces of adenoviral DNA with foreign sequences up to 7 kb (Grunhaus and Horwitz, 1992). In contrast to retrovirus, the adenoviral infection of host cells does not result in chromosomal integration because adenoviral DNA can replicate in an episomal manner without potential genotoxicity. Also, adenoviruses are structurally stable, and no genome rearrangement has been detected after extensive amplification. Adenovirus can infect virtually all epithelial cells regardless of their cell cycle stage and are able to infect non-dividing cells such as, for example, cardiomyocytes. So far, adenoviral infection appears to be linked only to mild disease such as acute respiratory disease in humans.

[0202] Adenovirus is particularly suitable for use as a gene delivery vector because of its mid-sized genome, ease of manipulation, high titer, wide target cell range and high infectivity. Both ends of the viral genome contain 100-200 base pair inverted repeats (ITRs), which are cis elements necessary for viral DNA replication and packaging. The early (E) and late (L) regions of the genome contain different transcription units that are divided by the onset of viral DNA replication. The E1 region (E1A and E1B) encodes proteins responsible for the regulation of transcription of the viral genome and a few cellular genes. The expression of the E2 region (E2A and E2B) results in the synthesis of the proteins for viral DNA replication. These proteins are involved in DNA replication, late gene expression and host cell shut-off (Renan, 1990). The products of the late genes, including the majority of the viral capsid proteins, are expressed only after significant processing of a single primary transcript issued by the major late promoter (MLP). The MLP, (located at 16.8 m.u.) is particularly efficient during the late phase of infection, and all the mRNA's issued from this promoter possess a 5′-tripartite leader (TPL) sequence which makes them preferred mRNA's for translation.

[0203] In a current system, recombinant adenovirus is generated from homologous recombination between shuttle vector and provirus vector. Due to the possible recombination between two proviral vectors, wild-type adenovirus may be generated from this process. Therefore, it is important to minimize this possibility by, for example, reducing or eliminating adnoviral sequence overlaps within the system and/or to isolate a single clone of virus from an individual plaque and examine its genomic structure.

[0204] Generation and propagation of the current adenovirus vectors, which are replication deficient, depend on a unique helper cell line, designated 293, which was transformed from human embryonic kidney cells by Ad5 DNA fragments and constitutively expresses E1 proteins (Graham et al., 1977). Since the E3 region is dispensable from the adenovirus genome (Jones and Shenk, 1978), the current adenovirus vectors, with the help of 293 cells, carry foreign DNA in either the E1, the E3 or both regions (Graham and Prevec, 1991). In nature, adenovirus can package approximately 105% of the wild-type genome (Ghosh-Choudhury et al., 1987), providing capacity for about 2 extra kb of DNA. Combined with the approximately 5.5 kb of DNA that is replaceable in the E1 and E3 regions, the maximum capacity of such adenovirus vectors is about 7.5 kb, or about 15% of the total length of the vector. Additionally, modified adenoviral vectors are now available which have an even greater capacity to carry foreign DNA.

[0205] Helper cell lines may be derived from human cells such as human embryonic kidney cells, muscle cells, hematopoietic cells or other human embryonic mesenchymal or epithelial cells. Alternatively, the helper cells may be derived from the cells of other mammalian species that are permissive for human adenovirus. Such cells include, e.g., Vero cells or other monkey embryonic mesenchymal or epithelial cells. As stated above, a preferred helper cell line is 293.

[0206] Racher et al. (1995) disclosed improved methods for culturing 293 cells and propagating adenovirus. In one format, natural cell aggregates are grown by inoculating individual cells into 1 liter siliconized spinner flasks (Techne, Cambridge, UK) containing 100-200 ml of medium. Following stirring at 40 rpm, the cell viability is estimated with trypsan blue. In another format, Fibra-Cel microcarriers (Bibby Sterlin, Stone, UK) (5 g/l) is employed as follows. A cell inoculum, resuspended in 5 ml of medium, is added to the carrier (50 ml) in a 250 ml Erlenmeyer flask and left stationary, with occasional agitation, for 1 to 4 h. The medium is then replaced with 50 ml of fresh medium and shaking initiated. For virus production, cells are allowed to grow to about 80% confluence, after which time the medium is replaced (to 25% of the final volume) and adenovirus added at an MOI of 0.05. Cultures are left stationary overnight, following which the volume is increased to 100% and shaking commenced for another 72 h.

[0207] Other than the requirement that the adenovirus vector be replication defective, or at least conditionally defective, the nature of the adenovirus vector is not believed to be crucial to the successful practice of the invention. The adenovirus may be selected from any of the 42 different known serotypes or subgroups A-F. Adenovirus type 5 of subgroup C is a preferred starting material for obtaining a replication-defective adenovirus vector for use in the present invention. This is, in part, because Adenovirus type 5 is a human adenovirus about which a great deal of biochemical and genetic information is known, and it has historically been used for most constructions employing adenovirus as a vector.

[0208] As stated above, one adenoviral vector according to the present invention lacks an adenovirus E1 region and thus, is replication. Typically, it is most convenient to introduce the polynucleotide encoding the gene of interest at the position from which the E1-coding sequences have been removed. However, the position of insertion of the construct within the adenovirus sequences is not critical to the invention. Further, other adenoviral sequences may be deleted and/or inactivated in addition to or in lieu of the E1 region. For example, the E2 and E4 regions are both necessary for adenoviral replication and thus may be modified to render an adenovirus vector replication-defective, in which case a helper cell line or helper virus complex may employed to provide such deleted/inactivated genes in trans. The polynucleotide encoding the gene of interest may alternatively be inserted in lieu of a deleted E3 region such as in E3 replacement vectors as described by Karlsson et al. (1986), or in a deleted E4 region where a helper cell line or helper virus complements the E4 defect. Other modifications are known to those of skill in the art and are likewise contemplated herein.

[0209] Adenovirus is easy to grow and manipulate and exhibits broad host range in vitro and in vivo. This group of viruses can be obtained in high titers, e.g., 10⁹-10¹² plaque-forming units per ml, and they are highly infective. The life cycle of adenovirus does not require integration into the host cell genome. The foreign genes delivered by adenovirus vectors are episomal and, therefore, have low genotoxicity to host cells. No side effects have been reported in studies of vaccination with wild-type adenovirus (Couch et al., 1963; Top et al., 1971), demonstrating their safety and therapeutic potential as in vivo gene transfer vectors.

[0210] Adenovirus vectors have been used in eukaryotic gene expression (Levrero et al., 1991; Gomez-Foix et al., 1992) and vaccine development (Grunhaus and Horwitz, 1992; Graham and Prevec, 1992). Recently, animal studies indicated that recombinant adenovirus could be used for gene therapy (Stratford-Perricaudet and Perricaudet, 1991; Stratford-Perricaudet et al., 1990; Rich et al., 1993). Studies in administering recombinant adenovirus to different tissues include administration via intracoronary catheter into one or more coronary arteries of the heart (Hammond, et al., U.S. Pat. Nos. 5,792,453 and 6,100,242) trachea instillation (Rosenfeld et al., 1991; Rosenfeld et al., 1992), muscle injection (Ragot et al., 1993), peripheral intravenous injections (Herz and Gerard, 1993) and stereotactic inoculation into the brain (Le Gal La Salle et al., 1993).

[0211] The retroviruses are a group of single-stranded RNA viruses characterized by an ability to convert their RNA to double-stranded DNA in infected cells by a process of reverse-transcription (Coffin, 1990). The resulting DNA then stably integrates into cellular chromosomes as a provirus and directs synthesis of viral proteins. The integration results in the retention of the viral gene sequences in the recipient cell and its descendants. The retroviral genome contains three genes, gag, pol, and env that code for capsid proteins, polymerase enzyme, and envelope components, respectively. A sequence found upstream from the gag gene contains a signal for packaging of the genome into virions. Two long terminal repeat (LTR) sequences are present at the 5′ and 3′ ends of the viral genome. These contain strong promoter and enhancer sequences and are also required for integration in the host cell genome (Coffin, 1990).

[0212] In order to construct a retroviral vector, a nucleic acid encoding a gene of interest is inserted into the viral genome in the place of certain viral sequences to produce a virus that is replication-defective. In order to produce virions, a packaging cell line containing the gag, pol, and env genes but without the LTR and packaging components is constructed (Mann et al., 1983). When a recombinant plasmid containing a cDNA, together with the retroviral LTR and packaging sequences is introduced into this cell line (by calcium phosphate precipitation for example), the packaging sequence allows the RNA transcript of the recombinant plasmid to be packaged into viral particles, which are then secreted into the culture media (Nicolas and Rubenstein, 1988; Temin, 1986; Mann et al., 1983). The media containing the recombinant retroviruses is then collected, optionally concentrated, and used for gene transfer. Retroviral vectors are able to infect a broad variety of cell types. However, integration and stable expression require the division of host cells (Paskind et al., 1975).

[0213] A novel approach designed to allow specific targeting of retrovirus vectors was recently developed based on the chemical modification of a retrovirus by the chemical addition of lactose residues to the viral envelope. This modification could permit the specific infection of hepatocytes via sialoglycoprotein receptors.

[0214] A different approach to targeting of recombinant retroviruses was designed in which biotinylated antibodies against a retroviral envelope protein and against a specific cell receptor were used. The antibodies were coupled via the biotin components by using streptavidin (Roux et al., 1989). Using antibodies against major histocompatibility complex class I and class II antigens, they demonstrated the infection of a variety of human cells that bore those surface antigens with an ecotropic virus in vitro (Roux et al., 1989).

[0215] There are certain limitations to the use of retrovirus vectors in all aspects of the present invention. For example, retrovirus vectors usually integrate into random sites in the cell genome. This can lead to insertional mutagenesis through the interruption of host genes or through the insertion of viral regulatory sequences that can interfere with the function of flanking genes (Varmus et al., 1981). Another concern with the use of defective retrovirus vectors is the potential appearance of wild-type replication-competent virus in the packaging cells. This can result from recombination events in which the intact-sequence from the recombinant virus inserts upstream from the gag, pol, env sequence integrated in the host cell genome. However, new packaging cell lines are now available that should greatly decrease the likelihood of recombination (Markowitz et al., 1988; Hersdorffer et al., 1990).

[0216] Other viral vectors may be employed as expression constructs in the present invention. Vectors derived from viruses such as vaccinia virus (Ridgeway, 1988; Baichwal and Sugden, 1986; Coupar et al., 1988) adeno-associated virus (AAV) (Ridgeway, 1988; Baichwal and Sugden, 1986; Hermonat and Muzycska, 1984) and herpesviruses may be employed. They offer several attractive features for various mammalian cells (Friedmann, 1989; Ridgeway, 1988; Baichwal and Sugden, 1986; Coupar et al., 1988; Horwich et al., 1990).

[0217] With the recent recognition of defective hepatitis B viruses, new insight was gained into the structure-function relationship of different viral sequences. In vitro studies showed that the virus could retain the ability for helper-dependent packaging and reverse transcription despite the deletion of up to 80% of its genome (Horwich et al., 1990). This indicated that large portions of the genome could be replaced with foreign genetic material. The hepatotropism and persistence (integration) were particularly attractive properties for liver-directed gene transfer. Chang et al., recently introduced the chloramphenicol acetyltransferase (CAT) gene into duck hepatitis B virus genome in the place of the polymerase, surface, and pre-surface coding sequences. It was co-transfected with wild-type virus into an avian hepatoma cell line. Culture media containing high titers of the recombinant virus were used to infect primary duckling hepatocytes. Stable CAT gene expression was detected for at least 24 days after transfection (Chang et al., 1991).

[0218] Non-Viral Delivery.

[0219] Several non-viral gene delivery vectors for the transfer of expression constructs into mammalian cells also are contemplated by the present invention. These include calcium phosphate precipitation (Graham and Van Der Eb, 1973; Chen and Okayama, 1987; Rippe et al., 1990) DEAE-dextran (Gopal, 1985), electroporation (Tur-Kaspa et al., 1986; Potter et al., 1984), direct microinjection (Harland and Weintraub, 1985), DNA-loaded liposomes (Nicolau and Sene, 1982; Fraley et al., 1979) and lipofectamine-DNA complexes, cell sonication (Fechheimer et al., 1987), gene bombardment using high velocity microprojectiles (Yang et al., 1990), and receptor-mediated transfection (Wu and Wu, 1987; Wu and Wu, 1988). Some of these techniques may be successfully adapted for in vivo or ex vivo use.

[0220] In yet another embodiment, the expression vector may simply consist of naked recombinant DNA or plasmids comprising the expression construct. Transfer of the construct may be performed by any of the methods mentioned above which physically or chemically permeabilize the cell membrane. This is particularly applicable for transfer in vitro but it may be applied to in vivo use as well. Dubensky et al. (1984) successfully injected polyomavirus DNA in the form of calcium phosphate precipitates into liver and spleen of adult and newborn mice demonstrating active viral replication and acute infection. Benvenisty and Neshif (1986) also demonstrated that direct intraperitoneal injection of calcium phosphate-precipitated plasmids results in expression of the transfected genes. It is envisioned that DNA encoding a gene of interest may also be transferred in a similar manner in vivo and express the gene product.

[0221] In still another embodiment of the invention, transferring of a naked DNA expression construct into cells may involve particle bombardment. This method depends on the ability to accelerate DNA-coated microprojectiles to a high velocity allowing them to pierce cell membranes and enter cells without killing them (Klein et al., 1987). Several devices for accelerating small particles have been developed. One such device relies on a high voltage discharge to generate an electrical current, which in turn provides the motive force (Yang et al., 1990). The microprojectiles used have consisted of biologically inert substances such as tungsten or gold beads.

[0222] Selected organs including the liver, skin, and muscle tissue of rats and mice have been bombarded in vivo (Yang et al., 1990; Zelenin et al., 1991). This may require surgical exposure of the tissue or cells, to eliminate any intervening tissue between the gun and the target organ, i.e., ex vivo treatment. Again, DNA encoding a particular gene may be delivered via this method and still be incorporated by the present invention.

[0223] In a further embodiment of the invention, the expression construct may be entrapped in a liposome, another non-viral gene delivery vector. Liposomes are vesicular structures characterized by a phospholipid bilayer membrane and an inner aqueous medium. Multilamellar liposomes have multiple lipid layers separated by aqueous medium. They form spontaneously when phospholipids are suspended in an excess of aqueous solution. The lipid components undergo self-rearrangement before the formation of closed structures and entrap water and dissolved solutes between the lipid bilayers (Ghosh and Bachhawat, 1991). Also contemplated are lipofectamine-DNA complexes.

[0224] Liposome-mediated nucleic acid delivery and expression of foreign DNA in vitro has been very successful. Wong et al., (1980) demonstrated the feasibility of liposome-mediated delivery and expression of foreign DNA in cultured chick embryo, HeLa and hepatoma cells. Nicolau et al. (1987) accomplished successful liposome-mediated gene transfer in rats after intravenous injection.

[0225] In certain embodiments of the invention, the liposome may be complexed with a hemagglutinating virus (HVJ). This has been shown to facilitate fusion with the cell membrane and promote cell entry of liposome-encapsulated DNA (Kaneda et al., 1989). In other embodiments, the liposome may be complexed or employed in conjunction with nuclear non-histone chromosomal proteins (HMG-1) (Kato et al., 1991). In yet further embodiments, the liposome may be complexed or employed in conjunction with both HVJ and HMG-1. In that such expression constructs have been successfully employed in transfer and expression of nucleic acid in vitro and in vivo, then they are applicable for the present invention. Where a bacterial promoter is employed in the DNA construct, it also will be desirable to include within the liposome an appropriate bacterial polymerase.

[0226] Other expression constructs which can be employed to deliver a nucleic acid encoding a particular gene into cells are receptor-mediated delivery vehicles. These take advantage of the selective uptake of macromolecules by receptor-mediated endocytosis in almost all eukaryotic cells. Because of the cell type-specific distribution of various receptors, the delivery can be highly specific (Wu and Wu, 1993).

[0227] Receptor-mediated gene targeting vehicles generally consist of two components: a cell receptor-specific ligand and a DNA-binding agent. Several ligands have been used for receptor-mediated gene transfer. The most extensively characterized ligands are asialoorosomucoid (ASOR) (Wu and Wu, 1987) and transferrin (Wagner et al., 1990). Recently, a synthetic neoglycoprotein, which recognizes the same receptor as ASOR, has been used as a gene delivery vehicle (Ferkol et al., 1993; Perales et al., 1994) and epidermal growth factor (EGF) has also been used to deliver genes to squamous carcinoma cells (Myers, EPO 0 273 085).

[0228] In other embodiments, the delivery vehicle may comprise a ligand and a liposome. For example, Nicolau et al. (1987) employed lactosyl-ceramide, a galactose-terminal asialganglioside, incorporated into liposomes and observed an increase in the uptake of the insulin gene by hepatocytes. Thus, it is feasible that a nucleic acid encoding a particular gene also may be specifically delivered into a cell type by any number of receptor-ligand systems with or without liposomes. For example, epidermal growth factor (EGF) may be used as the receptor for mediated delivery of a nucleic acid into cells that exhibit upregulation of EGF receptor. Mannose can be used to target the mannose receptor on liver cells. Also, antibodies to CD5 (CLL), CD22 (lymphoma), CD25 (T-cell leukemia) and MAA (melanoma) can similarly be used as targeting moieties.

[0229] In certain embodiments, gene transfer may more easily be performed under ex vivo conditions. Ex vivo gene therapy refers to the isolation of cells from an animal, the delivery of a nucleic acid into the cells in vitro, and then the return of the modified cells back into an animal. This may involve the surgical removal of tissue/organs from an animal or the primary culture of cells and tissues.

E. Screening Methods

[0230] The present invention includes embodiments that provide for methods of screening for a sleep-altering composition. Virtually any assay technique known to those of skill in the art is contemplated by the present invention. For example, the assays may comprise random high-throughput screening of large libraries of candidate substances. Alternatively, the assays may be used to focus on particular classes of compounds selected with an eye towards structural attributes that are believed to make them more likely to alter expression level or activity of a gene of interest. The assays involved in these screening methods may include cell-free assays, in vitro assays, in cyto assays, in vivo assays, or any assay technique known to those of skill in the art.

[0231] A sleep-altering composition is any composition that can modify the sleep requirements or the response to sleep deprivation of a subject. The candidate substance to be tested can be a substance suspected of altering expression level or activity of CG18190, Jheh 1, CG7228, lama, disco, CG6664, Casein kinase II β subunit, CG9171, GstE1, cAMP-dependent protein kinase R2, CG 5161, MESR3, Meics, Atpalpha, Calx, Rlip, nompC, H15, Lam, Glu-RIIA, Glu-RIIB, Ork1, Shaker, or Hyperkinetic gene products, or a homolog thereof. Alternatively, the candidate may simply be a member of a selected library of compounds. It will, of course, be understood that all the screening methods of the present invention are useful in themselves notwithstanding the fact that effective candidates may not be found. The invention provides methods for screening for such candidates, not solely methods of finding them.

[0232] 1. Modulators

[0233] A modulator may be a protein or fragment thereof, a small molecule, an antibody, an oligonucleotide, or even a polynucleotide. It may prove to be the case that the most useful pharmacological compounds will be compounds that are structurally related to known modulators of the expression level or activity of CG18190, Jheh 1, CG7228, lama, disco, CG6664, Casein kinase II β subunit, CG9171, GstE1, cAMP-dependent protein kinase R2 , CG15161, MESR3, Meics, Atpalpha, Calx, Rlip, nompC, H15, Lam, Glu-RIIA, Glu-RIIB, Ork1, Shaker, or Hyperkinetic gene products. Using lead compounds to help develop improved compounds is known as “rational drug design” and includes not only comparisons with known modulators, but predictions relating to the structure of target molecules.

[0234] The goal of rational drug design is to produce structural analogs of biologically active polypeptides or target compounds. By creating such analogs, it is possible to fashion drugs, which are more active or stable than the natural molecules, which have different susceptibility to alteration or which may affect the function of various other molecules. In one approach, one would generate a three-dimensional structure for a target molecule, or a fragment thereof. This could be accomplished by x-ray crystallography, computer modeling or by a combination of both approaches.

[0235] It also is possible to use antibodies to ascertain the structure of a target compound activator or inhibitor. In principle, this approach yields a pharmacore upon which subsequent drug design can be based. It is possible to bypass protein crystallography altogether by generating anti-idiotypic antibodies to a functional, pharmacologically active antibody. As a mirror image of a mirror image, the binding site of anti-idiotype would be expected to be an analog of the original antigen. The anti-idiotype could then be used to identify and isolate peptides from banks of chemically- or biologically-produced peptides. Selected peptides would then serve as the pharmacore. Anti-idiotypes may be generated using the methods described herein for producing antibodies, using an antibody as the antigen.

[0236] On the other hand, one may simply acquire, from various commercial sources, small molecule libraries that are believed to meet the basic criteria for useful drugs in an effort to “brute force” the identification of useful compounds. Screening of such libraries, including combinatorially generated libraries (e.g., peptide libraries), is a rapid and efficient way to screen large number of related (and unrelated) compounds for activity. Combinatorial approaches also lend themselves to rapid evolution of potential drugs by the creation of second, third and fourth generation compounds modeled of active, but otherwise undesirable compounds.

[0237] Candidate compounds may include compounds isolated from natural sources, such as animals, bacteria, fungi, plant sources, including leaves and bark, and marine samples may be assayed as candidates for the presence of potentially useful pharmaceutical agents. It will be understood that the pharmaceutical agents to be screened could also be derived or synthesized from chemical compositions or man-made compounds. Thus, it is understood that the candidate substance identified by the present invention may be peptide, polypeptide, oligonucleotide, polynucleotide, small molecule inhibitors or any other compounds that may be designed through rational drug design starting from known inhibitors or stimulators.

[0238] Other suitable modulators include antisense molecules, ribozymes, small interfering RNAs, and antibodies (including single-chain antibodies or expression constructs coding thereof), each of which would be specific for a given target molecule. Such compounds are described in greater detail elsewhere in this document. For example, an antisense molecule that bound to a translational or transcriptional start site, or splice junctions, would be an ideal candidate inhibitor.

[0239] In addition to the modulating compounds initially identified, the inventors also contemplate that other sterically similar compounds may be formulated to mimic the key portions of the structure of the modulators. Such compounds, which may include peptidomimetics of peptide modulators, may be used in the same manner as the initial modulators.

[0240] An agent that alters sleep may, according to the present invention, be one which exerts its effect upstream, downstream or directly on a known pathway involved in sleep regulation. Regardless of the type of composition identified by the present screening methods, the effect of the composition is sleep alteration.

[0241] 2. In Vitro Assays

[0242] A quick, inexpensive and easy assay to run is an in vitro assay. Such assays can be run quickly and in large numbers, thereby increasing the amount of information obtainable in a short period of time. A variety of vessels may be used to run the assays, including test tubes, plates, dishes and other surfaces such as dipsticks or beads. One example of a cell free assay is a binding assay. While not directly addressing effects on the activity of a molecule, much less sleep alteration, the ability of a candidate substance to bind to a target in vitro may be evidence of a related biological effect on an organism. For example, binding of a molecule to a target may, in and of itself, be inhibitory, due to steric, allosteric or charge-charge interactions.

[0243] The target may be either free in solution, fixed to a support, expressed in or on the surface of a cell. Either the target or the compound may be labeled, thereby permitting determining of binding. Usually, the target will be the labeled species, decreasing the chance that the labeling will interfere with or enhance binding. Competitive binding formats can be performed in which one of the agents is labeled, and one may measure the amount of free label versus bound label to determine the effect on binding.

[0244] A technique for high throughput screening of compounds is described in WO 84/03564, U.S. Pat. No. 6,457,809, U.S. Pat. No. 6,406,921, and U.S. Pat. No. 5,994,131. Large numbers of small peptide test compounds are synthesized on a solid substrate, such as plastic or some other surface. Bound polypeptide is detected by various methods.

[0245] 3. In Cyto Assays

[0246] Various cells and cell lines can be utilized for screening assays, including cells specifically engineered for this purpose. A particularly useful example of a cell for use in the present screening assays is a Drosophila cell of neuronal origin. However, other cells including those from mammals and even humans may be used. One of skill in the art would understand that the invention disclosed herein contemplates a wide variety of in cyto assays for measuring parameters that correlate with expression level or activity of CG18190, Jheh 1, CG7228, lama, disco, CG6664, Casein kinase II β subunit, CG9171, GstE1, cAMP-dependent protein kinase R2, CG15161, MESR3, Meics, Atpalpha, Calx, Rlip, nompC, H15, Lam, Glu-RIIA, Glu-RIIB, Ork1, Shaker, or Hyperkinetic gene products.

[0247] Depending on the assay, culture may be required. The cell may be examined using any of a number of different physiologic assays to assess effects, such as phosphorylation levels, enzymatic activity (in case of enzymes), binding properties (in case of receptors), or electrophysiological currents (in case of ionic channels). Alternatively, molecular analysis may be performed, for example, looking at protein expression, mRNA expression (including differential display of whole cell or polyA NA) and other parameters associated with expression level or activity of CG18190, Jheh 1, CG7228, lama, disco, CG6664, Casein kinase II β subunit, CG9171, GstE1, cAMP-dependent protein kinase R2 , CG15161, MESR3, Meics, Atpalpha, Calx, Rlip, nompC, H15, Lam, Glu-RIIA, Glu-RIIB, Ork1, Shaker, or Hyperkinetic gene products.

[0248] 4. In Vivo Assays

[0249] In vivo assays may involve the use of various animal, particularly including flies, but also mammals and humans. Specific assays may also use non-human transgenic animals that have been engineered to have specific defects or carry markers that can be used to measure the ability of a candidate substance to reach and effect different cells within the organism. Due to their size, ease of handling, and information on their physiology and genetic make-up, flies are the preferred transgenic embodiment, with mice being the preferred mammalian transgenics. However, other animals are suitable as well, including rats, rabbits, hamsters, guinea pigs, gerbils, woodchucks, cats, dogs, sheep, goats, pigs, cows, horses and monkeys (including chimps, gibbons and baboons). Assays for modulators may be conducted using an animal model derived from any of these species.

[0250] In such assays, one or more candidate substances are administered to the organism, and the ability of the candidate substance(s) to alter one or more characteristics, as compared to a similar animal not treated with the candidate substance(s), identifies an effect of the candidate substance on the expression level or activity of a gene product selected from the group consisting of CG18190, Jheh 1, CG7228, lama, disco, CG6664, Casein kinase II β subunit, CG9171, GstE1, cAMP-dependent protein kinase R2, CG15161, MESR3, Meics, Atpalpha, Calx, Rlip, nompC, H15, Lam, Glu-RIIA, Glu-RIIB, Ork1, Shaker, or Hyperkinetic gene products.

[0251] Treatment of organisms with test compounds will involve the administration of the compound, in an appropriate form, to the organism. Any animal model known to those of skill in the art can be used in the screening techniques of the present invention. Administration will be by any route that could be utilized for clinical or non-clinical purposes, including but not limited to oral, nasal, buccal, intratumoral, or even topical. Alternatively, administration may be by intratracheal instillation, bronchial instillation, intradermal, subcutaneous, intramuscular, intraperitoneal. inhalation or intravenous injection. Determining the effectiveness of a compound in vivo may involve a variety of different criteria. Also, measuring toxicity and dose response can be performed in animals in a more meaningful fashion than in in vitro or in cyto assays.

[0252] 5. Drosophila Assays

[0253] Various assays are available for assessing sleep and sleep effects in Drosophila, several of which are disclosed in the examples. Such assays are designed to measure sleep, the effects of sleep deprivation on various performance aspects such as vigilance and memory.

[0254] DAMS.

[0255] Fly behavior can be monitored using visual observation, an ultrasound activity monitoring system, and an automatic infrared system (Drosophila Activity Monitoring System, DAMS; Trikinetics, Waltham, Mass.). The ultrasound method (Shaw et al., 2000) allows a continuous, high-resolution measurement of the behavior of a single fly housed inside an ultrasound standing wave chamber (FIG. 1A). Whenever the fly moves its head, wings, or limbs, a perturbation of the standing wave is produced and is counted as a movement. Although very precise, this method is impractical for evaluating sleep/waking parameters in a large-scale project. The DAMS is instead designed to monitor hundreds or thousands of flies simultaneously. One DAMS monitor contains 32 glass tubes, each housing a single fly and enough food for 1-week recording (FIG. 1B). As each fly moves back and forth in its tube, it interrupts an infrared light beam that bisects the tube. Each crossing is counted as a movement and the number of movement every minute are summed up and expressed as “activity index”. Both the ultrasound and the infrared system had been validated by visual observation and give similar results: flies are mostly active and moving around during the day, while during the night they show long periods of immobility that can last several hours (FIG. 1C).

[0256] Behavioral quiescence qualifies as sleep only if it is accompanied by a reversible increase in arousal threshold. Arousal threshold in flies has been measured using vibratory, visual, auditory stimuli (Shaw et al., 2000; Nitz et al., 2002) and, more recently, thermal stimuli (inventors' unpublished results). In all cases it was found that flies that had been behaviorally awake immediately before the stimulus readily responded to low and medium stimulus intensities. By contrast, flies that had been behaviorally quiescent for 5 min or more rarely showed a motor response, although they quickly responded when the stimulus intensity was increased. Thus, sleep can be operatively defined in flies as any period of behavioral quiescence (no counts detected by the DAMS) lasting longer than 5 minutes (FIG. 1D).

[0257] Agitator Platform.

[0258] Sleep deprivation can be performed by gentle tapping on the glass tube whenever the fly stops moving for more than 5 min, or automatically. Currently, in the inventors' laboratory, wakefulness is enforced by placing the DAMS monitors vertically within a framed box able to rotate along its major axis under the control of a motor (FIG. 2A). The box can rotate 180° C. clock-wise or counter-clock-wise (2-3 revolutions/min). At the nadir of each rotation, the monitors are dropped 1 cm. This causes the flies to fall from their current position to the bottom of the tube. This method can effectively sleep deprive thousands of flies simultaneously for one or more days. Wild-type flies sleep longer after being sleep deprived (FIGS. 2B-C). Like in mammals, this sleep rebound occurs mainly immediately after the end of the sleep deprivation period (FIG. 2B), is more pronounced after longer (12-24 hours) than after shorter (6 hours) periods of sleep loss, and the recovered sleep only represents a fraction of what was lost (FIG. 2C). Importantly, there is no increase in sleep duration when female flies are subjected to 12 hours of the same stimulation during the day (when they are normally awake), ruling out aspecific effects (FIG. 2C). In mammals, sleep after sleep deprivation is also qualitatively different, i.e., is richer in slow-wave activity, a well-characterized EEG marker of sleep intensity and sleep pressure, and is less fragmented (i.e., there are fewer periods of brief awakenings during sleep; refs. Borbely and Achermann, 1999; Huber et al., 2000). New evidence from the inventors' laboratory shows that in flies sleep continuity is increased and the number of brief awakenings is reduced after sleep deprivation (Huber et al., 2004; FIG. 2D).

[0259] VAV Stimulus.

[0260] The inventors have assessed the effects of sleep deprivation on vigilance and memory in wild-type flies using vigilance tests and memory tests. In the vigilance test (FIG. 3), the locomotor response induced by a complex stimulus (visual+acoustic+vibratory) produced by a flap vigorously pushed against the glass tubes where the flies are housed is measured. Wild-type flies, as well as most mutant lines tested so far, respond by moving away from the side where the stimulus is delivered. By doing so, they cross the infrared beam, and the latency to crossing is measured by the DAMS monitor. The inventors only consider periods during which flies are awake and spontaneously patrolling the tubes (flies do not respond to the stimulus when asleep). The inventors calculate the mean latency to crossing the infrared beam from the time point at which the stimulus is delivered. For comparison, we then calculate the mean latency to crossing the infrared beam for a time point 1 minute before the stimulus is delivered. The difference before the 2 mean latencies is taken as an indicator of vigilance. A recent study performed in the inventors' laboratory shows that this difference is reduced in wild-type flies after 24 hours of sleep deprivation, an indication that vigilance is affected by sleep loss (Huber et al., 2004; FIG. 4).

[0261] Heat Box.

[0262] The ability of flies to learn and to retain memories can be tested using the heat box system, introduced by Dr. Martin Heisenberg (Wustmann et al., 1996; Wustmann and Heisenberg, 1997; Putz and Heisenberg, 2002). In each heating chamber of this apparatus (FIG. 5), a fly can be conditioned to avoid one side of the chamber if the chamber is heated whenever the fly enters that side; in a subsequent memory test without heat, the fly keeps avoiding the heat-associated side. The procedure has been extensively tested and offers several advantages relative to other methods: 1) it is fast, robust, requires little handling and therefore it is suitable to test a large number of flies; 2) flies are freely moving; 3) statistically significant learning curves can be obtained for individual flies. The inventors' laboratory has recently acquired a heat box system with 16 individual heating chambers. The system was built in Germany by the same people who developed the system in Dr. Heisenberg's laboratory several years ago.

F. Diagnosing and Treating Sleep Defects

[0263] In another aspect of the invention, there inventors now provide methods for identifying defects in the expression and activity of various gene targets that play important roles in sleep and sleep regulation. Thus, in another embodiment, there are provided methods for modulating the need for sleep or sleep deprivation recovery in a subject, include modulating the expression level or activity of one or more gene products encoded by a selected from the group consisting of CG18190, Jheh 1, CG7228, lama, disco, CG6664, Casein kinase II β subunit, CG9171, GstE1, cAMP-dependent protein kinase R2, CG15161, MESR3, Meics, Atpalpha, Calx, Rlip, nompC, H15, Lam, Glu-RIIA, Glu-RIIB, Ork1, shaker and HyperKinetic. In addition, a wide variety of defects in these targets, including point mutations, deletions, rearrangements or insertions in regulatory or coding sequences, as well as increases or decreases in levels of expression, may be assessed using standard technologies, as described below.

[0264] 1. Genetic Diagnosis

[0265] Some embodiments of the instant invention pertain to methods for identifying the basis of a sleep disorder in a subject that involve obtaining mRNA from a neuronal cell of the subject and measuring the expression level of an mRNA selected from CG18190, Jheh 1, CG7228, lama, disco, CG6664, Casein kinase II β subunit, CG9171, GstE1, cAMP-dependent protein kinase R2 , CG15161, MESR3, Meics, Atpalpha, Calx, Rlip, nompC, H15, Lam, Glu-RIIA, Glu-RIIB, Ork1, shaker and Hyperkinetic. Alternatively, this may comprise determining specific alterations in the mRNA or the genomic sequence from which the mRNA derives.

[0266] A suitable mRNA-containing biological sample can be a neuronal cell from any tissue of the subject. Various sources include the skin, muscle, facia, brain, prostate, breast, endometrium, lung, head & neck, pancreas, small intestine, blood cells, liver, testes, ovaries, colon, skin, stomach, esophagus, spleen, lymph node, bone marrow or kidney.

[0267] Nucleic acid used is isolated from neuronal cells contained in the biological sample, according to standard methodologies (Sambrook et al., 2001). The nucleic acid may be genomic DNA or fractionated or whole cell RNA. Where RNA is used, it may be desired to convert the RNA to a complementary DNA. In one embodiment, the RNA is whole cell RNA; in another, it is poly-A RNA. Normally, the nucleic acid is amplified.

[0268] Next, the identified product is detected. Depending on the format, the specific nucleic acid of interest is identified in the sample directly using amplification or with a second, labeled nucleic acid following amplification. In certain applications, the detection may be performed by visual means (e.g., ethidium bromide staining of a gel or integral labeling). Alternatively, the detection may involve indirect identification of the product via chemiluminescence, radioactive scintigraphy of radiolabel or fluorescent label or even via a system using electrical or thermal impulse signals (Affymax Technology; Bellus, 1994).

[0269] Various types of defects may be identified by the present methods. Thus, “alterations” should be read as including deletions, insertions, point mutations, rearrangements and duplications. Point mutations result in stop codons, frameshift mutations or amino acid substitutions. Somatic mutations are those occurring in non-germline tissues. Germ-line tissue can occur in any tissue and are inherited. Mutations in and outside the coding region also may affect the amount of protein produced, both by altering the transcription of the gene or in destabilizing or otherwise altering the processing of either the transcript (mRNA) or protein.

[0270] A variety of different assays are contemplated in this regard, including but not limited to, fluorescent in situ hybridization (FISH), direct DNA sequencing, PFGE analysis, Southern or Northern blotting, single-stranded conformation analysis (SSCA), RNAse protection assay, allele-specific oligonucleotide (ASO), dot blot analysis, denaturing gradient gel electrophoresis, RFLP and PCRTM-SSCP.

[0271] (i) Primers and Probes

[0272] The term primer, as defined herein, is meant to encompass any nucleic acid that is capable of priming the synthesis of a nascent nucleic acid in a template-dependent process. Typically, primers are oligonucleotides from ten to twenty base pairs in length, but longer sequences can be employed. Primers may be provided in double-stranded or single-stranded form, although the single-stranded form is preferred. Probes are defined differently, although they may act as primers. Probes, while perhaps capable of priming, are designed to binding to the target DNA or RNA and need not be used in an amplification process.

[0273] In preferred embodiments, the probes or primers are labeled with radioactive species (³²P, ¹⁴C, ³⁵S, ³H, or other label), with a fluorophore (rhodamine, fluorescein) or a chemillumiscent (luciferase).

[0274] (ii) Template Dependent Amplification Methods

[0275] A number of template dependent processes are available to amplify the marker sequences present in a given template sample. One of the best known amplification methods is the polymerase chain reaction (referred to as PCR™) which is described in detail in U.S. Pat. Nos. 4,683,195, 4,683,202 and 4,800,159, and in Innis et al., 1990, each of which is incorporated herein by reference in its entirety.

[0276] Briefly, in PCR™, two primer sequences are prepared that are complementary to regions on opposite complementary strands of the marker sequence. An excess of deoxynucleoside triphosphates are added to a reaction mixture along with a DNA polymerase, e.g., Taq polymerase. If the marker sequence is present in a sample, the primers will bind to the marker and the polymerase will cause the primers to be extended along the marker sequence by adding on nucleotides. By raising and lowering the temperature of the reaction mixture, the extended primers will dissociate from the marker to form reaction products, excess primers will bind to the marker and to the reaction products and the process is repeated.

[0277] A reverse transcriptase PCR™ amplification procedure may be performed in order to quantify the amount of mRNA amplified. Methods of reverse transcribing RNA into cDNA are well known and described in Sambrook et al., 2001. Alternative methods for reverse transcription utilize thermostable, RNA-dependent DNA polymerases. These methods are described in WO 90/07641 filed Dec. 21, 1990. Polymerase chain reaction methodologies are well known in the art.

[0278] Another method for amplification is the ligase chain reaction (“LCR”), disclosed in EP 0 320 308, incorporated herein by reference in its entirety. In LCR, two complementary probe pairs are prepared, and in the presence of the target sequence, each pair will bind to opposite complementary strands of the target such that they abut. In the presence of a ligase, the two probe pairs will link to form a single unit. By temperature cycling, as in PCR™, bound ligated units dissociate from the target and then serve as “target sequences” for ligation of excess probe pairs. U.S. Pat. No. 4,883,750 describes a method similar to LCR for binding probe pairs to a target sequence.

[0279] Methods based on ligation of two (or more) oligonucleotides in the presence of nucleic acid having the sequence of the resulting “di-oligonucleotide,” thereby amplifying the di-oligonucleotide, may also be used in the amplification step of the present invention. Wu et al., (1989), incorporated herein by reference in its entirety.

[0280] (iii) Southern/Northern Blotting

[0281] Blotting techniques are well known to those of skill in the art. Southern blotting involves the use of DNA as a target, whereas Northern blotting involves the use of RNA as a target. Each provide different types of information, although cDNA blotting is analogous, in many aspects, to blotting or RNA species.

[0282] Briefly, a probe is used to target a DNA or RNA species that has been immobilized on a suitable matrix, often a filter of nitrocellulose. The different species should be spatially separated to facilitate analysis. This often is accomplished by gel electrophoresis of nucleic acid species followed by “blotting” on to the filter.

[0283] Subsequently, the blotted target is incubated with a probe (usually labeled) under conditions that promote denaturation and rehybridization. Because the probe is designed to base pair with the target, the probe will binding a portion of the target sequence under renaturing conditions. Unbound probe is then removed, and detection is accomplished as described above.

[0284] (iv) Separation Methods

[0285] It normally is desirable, at one stage or another, to separate the amplification product from the template and the excess primer for the purpose of determining whether specific amplification has occurred. In one embodiment, amplification products are separated by agarose, agarose-acrylamide or polyacrylamide gel electrophoresis using standard methods. See Sambrook et al., 2001.

[0286] Alternatively, chromatographic techniques may be employed to effect separation. There are many kinds of chromatography which may be used in the present invention: adsorption, partition, ion-exchange and molecular sieve, and many specialized techniques for using them including column, paper, thin-layer and gas chromatography (Freifelder, 1982).

[0287] (v) Detection Methods

[0288] Products may be visualized in order to confirm amplification of the marker sequences. One typical visualization method involves staining of a gel with ethidium bromide and visualization under UV light. Alternatively, if the amplification products are integrally labeled with radio- or fluorometrically-labeled nucleotides, the amplification products can then be exposed to x-ray film or visualized under the appropriate stimulating spectra, following separation.

[0289] In one embodiment, visualization is achieved indirectly. Following separation of amplification products, a labeled nucleic acid probe is brought into contact with the amplified marker sequence. The probe preferably is conjugated to a chromophore but may be radiolabeled. In another embodiment, the probe is conjugated to a binding partner, such as an antibody or biotin, and the other member of the binding pair carries a detectable moiety.

[0290] In one embodiment, detection is by a labeled probe. The techniques involved are well known to those of skill in the art and can be found in many standard books on molecular protocols. See Sambrook et al. (2001). For example, chromophore or radiolabel probes or primers identify the target during or following amplification.

[0291] One example of the foregoing is described in U.S. Pat. No. 5,279,721, incorporated by reference herein, which discloses an apparatus and method for the automated electrophoresis and transfer of nucleic acids. The apparatus permits electrophoresis and blotting without external manipulation of the gel and is ideally suited to carrying out methods according to the present invention.

[0292] In addition, the amplification products described above may be subjected to sequence analysis to identify specific kinds of variations using standard sequence analysis techniques. Within certain methods, exhaustive analysis of genes is carried out by sequence analysis using primer sets designed for optimal sequencing (Pignon et al, 1994). The present invention provides methods by which any or all of these types of analyses may be used. Using the sequences disclosed herein, oligonucleotide primers may be designed to permit the amplification of sequences throughout the CG18190, Jheh 1, CG7228, lama, disco, CG6664, Casein kinase II β subunit, CG9171, GstE1, cAMP-dependent protein kinase R2, CG15161, MESR3, Meics, Atpalpha, Calx, Rlip, nompC, H15, Lam, Glu-RIIA, Glu-RIIB, Ork1, hyperkinetic and shaker genes that may then be analyzed by direct sequencing.

[0293] (vi) Kit Components

[0294] All the essential materials and reagents required for detecting variation in gene structure or expression may be assembled together in a kit. This generally will comprise preselected primers and probes. Also included may be enzymes suitable for amplifying nucleic acids including various polymerases (RT, Taq, Sequenase™ etc.), deoxynucleotides and buffers to provide the necessary reaction mixture for amplification. Such kits also generally will comprise, in suitable means, distinct containers for each individual reagent and enzyme as well as for each primer or probe.

[0295] 2. Immunological Diagnosis

[0296] Antibodies (discussed above) of the present invention can be used in detecting alterations in the expression level of sleep-related gene products. In addition, immunologic assays may be able to detect changes in primary or secondary structure of proteins as well. ELISAs and Western blotting are the most common forms of immunologic detection.

[0297] In one example, antibodies are immobilized onto a selected surface, preferably a surface exhibiting a protein affinity such as the wells of a polystyrene microtiter plate. After washing to remove incompletely adsorbed material, it is desirable to bind or coat the assay plate wells with a non-specific protein that is known to be antigenically neutral with regard to the test antisera such as bovine serum albumin (BSA), casein or solutions of powdered milk. This allows for blocking of non-specific adsorption sites on the immobilizing surface and thus reduces the background caused by non-specific binding of antigen onto the surface.

[0298] After binding of antibody to the well, coating with a non-reactive material to reduce background, and washing to remove unbound material, the immobilizing surface is contacted with the sample to be tested in a manner conducive to immune complex (antigen/antibody) formation. Following formation of specific immunocomplexes between the test sample and the bound antibody, and subsequent washing, the occurrence and even amount of immunocomplex formation may be determined by subjecting same to a second antibody having specificity for the same target, but that differs in binding specificity from the first antibody. Appropriate conditions preferably include diluting the sample with diluents such as BSA, bovine gamma globulin (BGG) and phosphate buffered saline (PBS)/Tween®. These added agents also tend to assist in the reduction of nonspecific background. The layered antisera is then allowed to incubate for from about 2 to about 4 hr, at temperatures preferably on the order of about 25° to about 27° C. Following incubation, the antisera-contacted surface is washed so as to remove non-immunocomplexed material. A preferred washing procedure includes washing with a solution such as PBS/Tween®, or borate buffer.

[0299] To provide a detecting means, the second antibody will preferably have an associated enzyme that will generate a color development upon incubating with an appropriate chromogenic substrate. Thus, for example, one will desire to contact and incubate the second antibody-bound surface with a urease, alkaline phosphatase, glucose oxidase, or (horseradish) peroxidase-conjugated anti-human IgG for a period of time and under conditions which favor the development of immunocomplex formation (e.g., incubation for 2 hr at room temperature in a PBS-containing solution such as PBS/Tween®).

[0300] After incubation with the second enzyme-tagged antibody, and subsequent to washing to remove unbound material, the amount of label is quantified by incubation with a chromogenic substrate such as urea and bromocresol purple or 2,2′-azino-di-(3-ethyl-benzthiazoline)-6-sulfonic acid (ABTS) and H₂O₂, in the case of peroxidase as the enzyme label. Quantitation is then achieved by measuring the degree of color generation, e.g., using a visible spectrum spectrophotometer.

[0301] The preceding format may be altered by first binding the sample to the assay plate. Then, primary antibody is incubated with the assay plate, followed by detecting of bound primary antibody using a labeled second antibody with specificity for the primary antibody.

[0302] The antibody compositions of the present invention will find great use in immunoblot or Western blot analysis. The antibodies may be used as high-affinity primary reagents for the identification of proteins immobilized onto a solid support matrix, such as nitrocellulose, nylon or combinations thereof. In conjunction with immunoprecipitation, followed by gel electrophoresis, these may be used as a single step reagent for use in detecting antigens against which secondary reagents used in the detection of the antigen cause an adverse background. Immunologically-based detection methods for use in conjunction with Western blotting include enzymatically-, radiolabel-, or fluorescently-tagged secondary antibodies are considered to be of particular use in this regard.

[0303] 3. Treating Sleep Defects by Modulating Gene Expression/Function

[0304] The present invention also involves, in other embodiments, methods of reducing the need for sleep, or improving sleep deprivation recovery, in a subject. Such methods include modulating the expression level or activity of one or more gene products encoded by CG18190, Jheh 1, CG7228, lama, disco, CG6664, Casein kinase II β subunit, CG9171, GstE1, cAMP-dependent protein kinase R2 , CG15161, MESR3, Meics, Atpalpha, Calx, Rlip, nompC, H15, Lam, Glu-RIIA, Glu-RIIB, Ork1, hyperkinetic and shaker. Further embodiments pertain to methods of inhibiting or increasing sleep in a subject that include modulating the expression level or activity of a gene product encoded by a gene selected from the group consisting of CG18190, Jheh 1, CG7228, lama, disco, CG6664, Casein kinase II β subunit, CG9171, GstE1, cAMP-dependent protein kinase R2, CG15161, MESR3, Meics, Atpalpha, Calx, Rlip, nompC, H15, Lam, Glu-RIIA, Glu-RIIB, Ork1, hyperkinetic and shaker.

[0305] The lengthy discussion of expression vectors, antisense, ribozymes, siRNA and gene transfer discussed in previous sections is incorporated into this section by reference. Such agents may be used to inhibit the expression of CG18190, Jheh 1, CG7228, lama, disco, CG6664, Casein kinase II β subunit, CG9171, GstE1, cAMP-dependent protein kinase R2, CG15161, MESR3, Meics, Atpalpha, Calx, Rlip, nompC, H15, Lam, Glu-RIIA, Glu-RIIB, Ork1, and shaker. Also useful will be single chain antibodies, and genetic constructs coding therefor, that are directed to these targets. Particularly useful expression vectors are viral vectors such as adenovirus, adeno-associated virus, herpesvirus, vaccinia virus and retrovirus. Also encompassed are liposomally-encapsulated expression vectors. Pharmaceutical agents that modify the activity or expression of sleep-related gene products, for example those identified according to the screening methods disclosed herein, may also be employed. Such agents include toxins specific for various channels that are identified herein as contributing to sleep function, and antibodies designed to bind near the pore of channels.

[0306] Those of skill in the art are aware of how to administer therapeutic agents in accordance with the present invention. For example, gene delivery in vivo may rely on viral or non-viral vectors. For viral vectors, one generally will prepare a viral vector stock. Depending on the kind of virus and the titer attainable, one will deliver 1×10⁴, 1×10⁵, 1×10⁶, 1×10⁷, 1×10⁸, 1×10⁹, 1×10¹⁰, 1×10¹¹ or 1×10¹² infectious particles to the patient. Similar figures may be extrapolated for liposomal or other non-viral formulations by comparing relative uptake efficiencies. Formulation as a pharmaceutically acceptable composition is discussed below. Various routes are contemplated, including local and systemic, but targeted provision to the heart is preferred. (See, for example Hammond et al., supra, hereby incorporated by reference in its entirety.)

[0307] 4. Combined Therapy

[0308] In many clinical situations, it is advisable to use a combination of distinct therapies. Thus, it is envisioned that, in addition to the therapies described above, one would also wish to provide to the patient more “traditional” pharmaceutical sleep-modifying therapies. Also envisioned are combinations with pharmaceuticals identified according to the screening methods described herein.

[0309] Combinations may be achieved by contacting a subject with a single composition or pharmacological formulation that includes both agents, or by contacting the subject with two distinct compositions or formulations, at the same time, wherein one composition includes the expression construct and the other includes the agent. Alternatively, the sleep therapy of the present invention may precede or follow the other agent treatment by intervals ranging from minutes to weeks. In embodiments where the other agent and expression construct are applied separately to the subject, one would generally ensure that a significant period of time did not expire between the time of each delivery, such that the agent and expression construct would still be able to exert an advantageously combined effect on the subject. In such instances, it is contemplated that one would contact the subject with both modalities within about 12-24 hours of each other and, more preferably, within about 6-12 hours of each other, with a delay time of only about 12 hours being most preferred. In some situations, it may be desirable to extend the time period for treatment significantly, however, where several days (2, 3, 4, 5, 6 or 7) to several weeks (1, 2, 3, 4, 5, 6, 7 or 8) lapse between the respective administrations.

[0310] It also is conceivable that more than one administration of either a therapeutic gene, protein or therapeutic agent, or the traditional agent will be desired. Various combinations may be employed, where sleep-modifying therapy of the present invention is “A” and the traditional agent is “B”, as exemplified below:

| | | | | | | | |
|---|---|---|---|---|---|---|---|
| A/B/A | B/A/B | B/B/A | A/A/B | B/A/A | A/B/B | B/B/B/A | B/B/A/B |

| | | | | | | |
|---|---|---|---|---|---|---|
| A/A/B/B | A/B/A/B | A/B/B/A | B/B/A/A | B/A/B/A | B/A/A/B | B/B/B/A |
| A/A/A/B | B/A/A/A | A/B/A/A | A/A/B/A | A/B/B/B | B/A/B/B | B/B/A/B |

Other combinations are contemplated as well. An exemplary list of traditional sleep-related drugs includes various sleep-inducing agents such sedatives and tranquilizers. Particular drugs include 40 Winks, acetaminophen, isomethepentene, dichloralphenazone, diphenhydramine, AllerMax Oral, promethazine, anergan, hydroxyzine, lorazepam, Banophen Oral, Benadryl, atarax, ativan, butabarbital, butisol, bydramine, chlordiazepoxide, clorazepate, Compoz Gel Caps, Compox Nighttime Sleep Aid, flurazepam, dalmane, diazepam, diastat, intensol, dihydrex, Diphen Cough, Diphenacen-50 Injection, Diphenhist, diphenydramine, quazepam, Doral, Dormrin OTC, estazolam, clorazepate, Gen-XENE, Genahist Oral, halcion, haloperidol, triazolam, haldol, haldol deconoate, hydroxyzine, hyrexin-50 Injection, Hyzine-50, librium, luminal, phenobarbital, maximum strength Nytol, mephobarbital, mebaral, Mile Nervine Caplets OTC, pentobarbital, nembutal, nordryl, nordryl oral, Nytol Oral OTC, pentazocine, phenergan, ProSom, quazepam, Restall, Restoril, temazepam, Siladryl Oral OTC, Silphen Couhg, Sleep-eze 3 Oral OTC, Sleepinal, Sleepwell 2-nite OTC, Sominex Oral OTC, Sonata, Talacen, Talwin Compound, Talwin NX, Tranxene, Tusstat Syrup, Twilite Oral OTC, Uni-Bent Cough Syrup, valium, vistacot, vistaril, zalepon, and zolpidem.

[0311] 5. Formulations and Routes for Administration to Patients

[0312] Where clinical applications are contemplated, it will be necessary to prepare pharmaceutical compositions in a form appropriate for the intended application. Generally, this will entail preparing compositions that are essentially free of pyrogens, as well as other impurities that could be harmful to humans or animals.

[0313] One will generally desire to employ appropriate salts and buffers to render delivery vectors stable and allow for uptake by target cells. Buffers also will be employed when recombinant cells are introduced into a patient. Aqueous compositions of the present invention comprise an effective amount of the vector to cells, dissolved or dispersed in a pharmaceutically acceptable carrier or aqueous medium. Such compositions also are referred to as inocula. The phrase “pharmaceutically or pharmacologically acceptable” refer to molecular entities and compositions that do not produce adverse, allergic, or other untoward reactions when administered to an animal or a human. As used herein, “pharmaceutically acceptable carrier” includes any and all solvents, dispersion media, coatings, antibacterial and antifungal agents, isotonic and absorption delaying agents and the like. The use of such media and agents for pharmaceutically active substances is well know in the art. Except insofar as any conventional media or agent is incompatible with the vectors or cells of the present invention, its use in therapeutic compositions is contemplated. Supplementary active ingredients also can be incorporated into the compositions.

[0314] The active compositions of the present invention may include classic pharmaceutical preparations. Administration of these compositions according to the present invention will be via any common route so long as the target tissue is available via that route. This includes oral and nasal administration, but also includes intradermal, subcutaneous, intramuscular, intraperitoneal, intravascular or intravenous injection.

[0315] Solutions of the active compounds as free base or pharmacologically acceptable salts can be prepared in water suitably mixed with a surfactant, such as hydroxypropylcellulose. Dispersions can also be prepared in glycerol, liquid polyethylene glycols, and mixtures thereof and in oils. Under ordinary conditions of storage and use, these preparations contain a preservative to prevent the growth of microorganisms.

[0316] The pharmaceutical forms suitable for injectable use include sterile aqueous solutions or dispersions and sterile powders for the extemporaneous preparation of sterile injectable solutions or dispersions. In all cases the form must be sterile and must be fluid to the extent that easy syringability exists. It must be stable under the conditions of manufacture and storage and must be preserved against the contaminating action of microorganisms, such as bacteria and fungi. The carrier can be a solvent or dispersion medium containing, for example, water, ethanol, polyol (for example, glycerol, propylene glycol, and liquid polyethylene glycol, and the like), suitable mixtures thereof, and vegetable oils. The proper fluidity can be maintained, for example, by the use of a coating, such as lecithin, by the maintenance of the required particle size in the case of dispersion and by the use of surfactants. The prevention of the action of microorganisms can be brought about by various antibacterial an antifungal agents, for example, parabens, chlorobutanol, phenol, sorbic acid, thimerosal, and the like. In many cases, it will be preferable to include isotonic agents, for example, sugars or sodium chloride. Prolonged absorption of the injectable compositions can be brought about by the use in the compositions of agents delaying absorption, for example, aluminum monostearate and gelatin.

[0317] Sterile injectable solutions are prepared by incorporating the active compounds in the required amount in the appropriate solvent with various of the other ingredients enumerated above, as required, followed by filtered sterilization. Generally, dispersions are prepared by incorporating the various sterilized active ingredients into a sterile vehicle which contains the basic dispersion medium and the required other ingredients from those enumerated above. In the case of sterile powders for the preparation of sterile injectable solutions, the preferred methods of preparation are vacuum-drying and freeze-drying techniques which yield a powder of the active ingredient plus any additional desired ingredient from a previously sterile-filtered solution thereof.

[0318] As used herein, “pharmaceutically acceptable carrier” includes any and all solvents, dispersion media, coatings, antibacterial and antifungal agents, isotonic and absorption delaying agents and the like. The use of such media and agents for pharmaceutical active substances is well known in the art. Except insofar as any conventional media or agent is incompatible with the active ingredient, its use in the therapeutic compositions is contemplated. Supplementary active ingredients can also be incorporated into the compositions.

[0319] For oral administration, the polypeptides of the present invention may be incorporated with excipients and used in the form of non-ingestible mouthwashes and dentifrices. A mouthwash may be prepared incorporating the active ingredient in the required amount in an appropriate solvent, such as a sodium borate solution (Dobell's Solution). Alternatively, the active ingredient may be incorporated into an antiseptic wash containing sodium borate, glycerin and potassium bicarbonate. The active ingredient may also be dispersed in dentifrices, including: gels, pastes, powders and slurries. The active ingredient may be added in a therapeutically effective amount to a paste dentifrice that may include water, binders, abrasives, flavoring agents, foaming agents, and humectants.

[0320] The compositions of the present invention may be formulated in a neutral or salt form. Pharmaceutically-acceptable salts include the acid addition salts (formed with the free amino groups of the protein) and which are formed with inorganic acids such as, for example, hydrochloric or phosphoric acids, or such organic acids as acetic, oxalic, tartaric, mandelic, and the like. Salts formed with the free carboxyl groups can also be derived from inorganic bases such as, for example, sodium, potassium, ammonium, calcium, or ferric hydroxides, and such organic bases as isopropylamine, trimethylamine, histidine, procaine and the like.

[0321] Upon formulation, solutions will be administered in a manner compatible with the dosage formulation and in such amount as is therapeutically effective. The formulations are easily administered in a variety of dosage forms such as injectable solutions, drug release capsules and the like. For parenteral administration in an aqueous solution, for example, the solution should be suitably buffered if necessary and the liquid diluent first rendered isotonic with sufficient saline or glucose. These particular aqueous solutions are especially suitable for intravenous, intramuscular, subcutaneous and intraperitoneal administration. In this connection, sterile aqueous media which can be employed will be known to those of skill in the art in light of the present disclosure. For example, one dosage could be dissolved in 1 ml of isotonic NaCl solution and either added to 1000 ml of hypodermoclysis fluid or injected at the proposed site of infusion, (see for example, “Remington's Pharmaceutical Sciences” 15th Edition, pages 1035-1038 and 1570-1580). Some variation in dosage will necessarily occur depending on the condition of the subject being treated. The person responsible for administration will, in any event, determine the appropriate dose for the individual subject. Moreover, for human administration, preparations should meet sterility, pyrogenicity, general safety and purity standards as required by FDA Office of Biologics standards.

### G. EXAMPLES

[0322] The following examples are included to demonstrate preferred embodiments of the invention. It should be appreciated by those of skill in the art that the techniques disclosed in the examples which follow represent techniques discovered by the inventor to function well in the practice of the invention, and thus can be considered to constitute preferred modes for its practice. However, those of skill in the art should, in light of the present disclosure, appreciate that many changes can be made in the specific embodiments which are disclosed and still obtain a like or similar result without departing from the spirit and scope of the invention.

### Example 1: Materials and Methods

Analysis of Sleep in Drosophila.

[0323] The inventors monitored fly behavior using visual observation, an ultrasound activity monitoring system, and an automatic infrared system (Drosophila Activity Monitoring System, DAMS; Trikinetics, Waltham, Mass.). The ultrasound method (Shaw et al., 2000) allows a continuous, high-resolution measurement of the behavior of a single fly housed inside an ultrasound standing wave chamber (FIG. 1A). Whenever the fly moves its head, wings, or limbs, a perturbation of the standing wave is produced and is counted as a movement. Although very precise, this method is impractical for evaluating sleep/waking parameters in a large-scale project. The DAMS is instead designed to monitor hundreds or thousands of flies simultaneously. One DAMS monitor contains 32 glass tubes, each housing a single fly and enough food for 1-week recording (FIG. 1B). As each fly moves back and forth in its tube, it interrupts an infrared light beam that bisects the tube. Each crossing is counted as a movement and the number of movement every minute are summed up and expressed as “activity index”. Both the ultrasound and the infrared system had been validated by visual observation and give similar results: flies are mostly active and moving around during the day, while during the night they show long periods of immobility that can last several hours (FIG. 1C).

[0324] Behavioral quiescence qualifies as sleep only if it is accompanied by a reversible increase in arousal threshold. Arousal threshold in flies has been measured using vibratory, visual, auditory stimuli (Shaw et al., 2000; Nitz et al., 2002) and, more recently, thermal stimuli (inventors' unpublished results). In all cases it was found that flies that had been behaviorally awake immediately before the stimulus readily responded to low and medium stimulus intensities. By contrast, flies that had been behaviorally quiescent for 5 min or more rarely showed a motor response, although they quickly responded when the stimulus intensity was increased. Thus, sleep can be operatively defined in flies as any period of behavioral quiescence (no counts detected by the DAMS) lasting longer than 5 minutes (FIG. 1D).

Analysis of the Response to Sleep Deprivation in Drosophila.

[0325] Sleep deprivation can be performed by gentle tapping on the glass tube whenever the fly stops moving for more than 5 min, or automatically. Currently, in the inventors' laboratory, wakefulness is enforced by placing the DAMS monitors vertically within a framed box able to rotate along its major axis under the control of a motor (FIG. 2A). The box can rotate 180° C. clock-wise or counter-clock-wise (2-3 revolutions/min). At the nadir of each rotation, the monitors are dropped 1 cm. This causes the flies to fall from their current position to the bottom of the tube. This method can effectively sleep deprive thousands of flies simultaneously for one or more days. Wild-type flies sleep longer after being sleep deprived (FIGS. 2B-C). Like in mammals, this sleep rebound occurs mainly immediately after the end of the sleep deprivation period (FIG. 2B), is more pronounced after longer (12-24 hours) than after shorter (6 hours) periods of sleep loss, and the recovered sleep only represents a fraction of what was lost (FIG. 2C). Importantly, there is no increase in sleep duration when female flies are subjected to 12 hours of the same stimulation during the day (when they are normally awake), ruling out aspecific effects (FIG. 2C). In mammals, sleep after sleep deprivation is also qualitatively different, i.e., is richer in slow-wave activity, a well-characterized EEG marker of sleep intensity and sleep pressure, and is less fragmented (i.e., there are fewer periods of brief awakenings during sleep; refs. Borbely and Achermann, 1999; Huber et al., 2000). New evidence from the inventors' laboratory shows that in flies sleep continuity is increased and the number of brief awakenings is reduced after sleep deprivation (Huber et al., 2004; FIG. 2D).

Analysis of the Effects of Sleep Loss on Vigilance in Drosophila.

[0326] The inventors have assessed the effects of sleep deprivation on vigilance and memory in wild-type flies using vigilance tests and memory tests. In the vigilance test (FIG. 3), the locomotor response induced by a complex stimulus (visual+acoustic+vibratory) produced by a flap vigorously pushed against the glass tubes where the flies are housed is measured. Wild-type flies, as well as most mutant lines tested so far, respond by moving away from the side where the stimulus is delivered. By doing so, they cross the infrared beam, and the latency to crossing is measured by the DAMS monitor. The inventors only consider periods during which flies are awake and spontaneously patrolling the tubes (flies do not respond to the stimulus when asleep). The inventors calculate the mean latency to crossing the infrared beam from the time point at which the stimulus is delivered. For comparison, one then calculates the mean latency to crossing the infrared beam for a time point 1 minute before the stimulus is delivered. The difference before the 2 mean latencies is taken as an indicator of vigilance. Preliminary data show that this difference is reduced in wild-type flies after 24 hours of sleep deprivation, an indication that vigilance is affected by sleep loss (FIG. 4).

Analysis of the Effects of Sleep Loss on Memory in Drosophila.

[0327] The ability of flies to learn and to retain memories can be tested using the heat box system, introduced by Dr. Martin Heisenberg (Wustmann et al., 1996; Wustmann and Heisenberg, 1997; Putz and Heisenberg, 2002). In each heating chamber of this apparatus (FIG. 5), a fly can be conditioned to avoid one side of the chamber if the chamber is heated whenever the fly enters that side; in a subsequent memory test without heat, the fly keeps avoiding the heat-associated side. The procedure has been extensively tested and offers several advantages relative to other methods: 1) it is fast, robust, requires little handling and therefore it is suitable to test a large number of flies; 2) flies are freely moving; 3) statistically significant learning curves can be obtained for individual flies. The inventors' laboratory has recently acquired a heat box system with 16 individual heating chambers. The system was built in Germany by the same people who developed the system in Dr. Heisenberg's laboratory several years ago.

### Example 2: Results

[0328] The demonstration that Drosophila sleeps has advanced the knowledge of the phylogeny of sleep, supporting the notion that sleep fulfills at least one fundamental function in many divergent animal species. However, Drosophila can also benefit sleep research by offering a powerful tool for the genetic dissection of sleep, just as it has benefited research on circadian rhythms. The inventors have embarked on a large-scale mutagenesis screening in search for flies that need little sleep and/or do not show a sleep rebound after sleep deprivation. The final goal is to screen as many mutant fly lines as there are fly genes. Over the last 3 years, ˜9000 mutant lines have been screened, many of them carrying a mutation in a single gene (Cirelli, 2003). The mutation was caused either by the insertion of a transposon in the fly genome (insertional mutagenesis; ˜3000 lines screened so far), or by ethyl methanesulfonate (EMS, chemical mutagenesis; ˜6000 lines screened so far). Insertional lines such as those available from public stock centers, e.g., the ˜1000 lines of the Berkeley Drosophila Genome Project primary collection (Spradling et al., 1999) and the ˜2300 lines of the Rorth collection (Rorth et al., 1998) include both loss-of-function mutations and gain-of-function mutations. The first are often due to the insertion of a transposon inside a transcription unit, the latter to gene overexpression following the transposon insertion upstream of the transcription start site. Insertional and chemical mutagenesis offer different advantages. Insertional mutagenesis usually allows rapid identification of the mutated gene by sequencing the flanking sequences from one or both ends of the transposon insertion. Moreover, the mobilization of the inserted element can generate new alleles, and expression patterns can be characterized by lacZ staining of tissues. However, transposons do not insert at random into the genome, but have preferred hot spots (Liao et al., 2000). Chemical mutagenesis with EMS, on the other hand, randomly induces small (point) mutations over the entire genome at a reasonable rate, but the molecular characterization of the gene of interest may be not as straightforward.

[0329] In the current mutagenesis screening, mutant flies were continuously recorded in a DAMS monitor for one week, including 2-3 baseline days, 24 hours of sleep deprivation, and 1-3 days of recovery after sleep deprivation. Ten to sixteen flies (4-7 day old at the beginning of the experiment) were tested for each line. This relatively high number of flies is needed because sleep pattern and sleep amount, although consistent across different days in each individual adult fly, may vary among different flies (FIG. 6A). Interestingly, the analysis of thousand of lines has confirmed a significant difference between male and female flies: while female flies sleep almost exclusively during the night, males show also a long period of sleep in the middle of the day. The daily amount of sleep in the mutant lines tested so far shows a linear distribution, with female flies for most lines sleeping between 400 and 800 min/day, with a mean of ˜600 min, similar to that of wild-type flies (Canton-S female flies=664±137, mean±SD; FIG. 6B). Eighteen lines have so far qualified as “short-sleepers”, i.e., their daily sleep amount is less than 2 standard deviations from the mean of all mutant lines tested so far (<280 min/day in female flies; FIG. 6B). An example of a short sleeper line is shown in FIG. 6C.

[0330] Almost all mutant lines tested so far showed an increase in sleep duration and a decrease in sleep fragmentation after 24 hours of sleep deprivation. As in wild-type flies, the sleep rebound is most pronounced during the first 4-6 hours immediately after the end of the sleep deprivation period, and in most cases does not persist the second day after sleep loss (FIGS. 2B and 7). Similarly to wild-type flies, most mutant lines only recover a small fraction (10-40%) of the sleep lost. So far, the inventors have identified only 5 lines, one of which is also a short sleeper line, which show no sleep rebound after 24 hours of sleep deprivation, suggesting that this phenotype might be even rarer than the short-sleeper phenotype. Since sleep deprivation, as well as chronic sleep restriction, affect vigilance, short sleeper lines and “no-rebound” lines are currently being tested to determine whether their waking performance is normal.

[0331] Among the most promising short sleeper lines identified in the mutagenesis screening were EMS lines 1174 and 1179. The inventors have shown (FIGS. 8A-12), the inventors show that 1174 and 1179 flies (called ss flies for short sleepers) sleep only one third of the wild-type amount. Moreover, they show that these flies perform normally in a number of tasks, have preserved sleep homeostasis, but are not impaired by sleep deprivation. The inventors demonstrate in this study that the short sleeper phenotype in 1174 and 1179 flies is due to the same point mutation in a conserved domain of the Shaker gene. Moreover, after crossing out genetic modifiers accumulated over many generations, they also show that other Shaker alleles also become short sleepers. Thus, this study demonstrates that Shaker, which encodes the alpha subunit of a voltage-dependent potassium channel controlling membrane repolarization and transmitter release, may regulate sleep need or efficiency. More recent data from the inventors' laboratory also show that mutations in Hyperkinetic, the gene coding for the beta (regulatory) subunit of the same voltage-potassium channel mutated in lines 1174 and 1179, are also associated with a short sleeper phenotype. The potassium channel coded by Shaker is highly conserved across species, and his mammalian homologues are the potassium channels of the Kv1 family, with Kv 1.2 being the one sharing the highest homology.

[0332] A recent report (Liguori et al., 2001) described a patient affected by Morvan's syndrome whose most prominent symptom was a severe and continuous insomnia similar to that reported in patients with fatal familial insomnia (FFI). In the Morvan's patient, the insomnia would temporarily improve after plasma exchange. Antibodies against voltage-dependent K channels, including Kv 1.2, were shown in the patient's CNS by direct immunocytochemistry. Thus, given the established role of Kv channels in the control of neuronal depolarization, the fly mutant data reported here (EMS lines 1174 and 1179), and the Morvan's syndrome report, it is possible that Kv channels play a major role in controlling sleep and waking states. To test this hypothesis, the inventors have custom-designed antibodies capable of binding to a portion of the extracellular pore forming region of the Kv 1.2 channel. Previous studies by Zhou et al. (1998) have shown that antibodies against this region can reduce by 70% the Kv 1.2-mediated current.

[0333] Anti-Kv 1.2 is currently administered to rats either via a miniosmotic pump that allows the continuous infusion (1-week) of the antibody in the cerebral cortex of one side or via a bolus injection in the carotid artery following transient opening of the brain blood barrier using mannitol. The goal is to determine whether the antibody infusion can prevent slow wave sleep. Rats are chronically implanted for EEG and EMG recordings. The preliminary control data obtained thus far show that the infusion of rabbit IgGs per se does not affect sleep. Moreover, the histological analysis shows that following the unilateral infusion of anti-Kv 1.2 the antibody can be detected on the extracellular membranes of neurons in the cortical regions targeted by the injection but not elsewhere.

[0334] Finally, preliminary experiments show that a unilateral infusion of anti-Kv1.2 is able to reduce the amount of slow waves during sleep (FIGS. 13A-B). The effect can last several days (at least 5 days, as indicated in FIGS. 13A-B), is specific for the site of the injection (in FIGS. 13A-B, low panels restricted to the right side), and is restricted to the frequency band (0.5-4 Hz) typical of slow waves (compare FIGS. 13A and B).

[0335] All of the compositions and methods disclosed and claimed herein can be made and executed without undue experimentation in light of the present disclosure. While the compositions and methods of this invention have been described in terms of preferred embodiments, it will be apparent to those of skill in the art that variations may be applied to the compositions and methods and in the steps or in the sequence of steps of the method described herein without departing from the concept, spirit and scope of the invention. More specifically, it will be apparent that certain agents which are both chemically and physiologically related may be substituted for the agents described herein while the same or similar results would be achieved. All such similar substitutes and modifications apparent to those skilled in the art are deemed to be within the spirit, scope and concept of the invention as defined by the appended claims.

H. References

[0336] The following references, to the extent that they provide exemplary procedural or other details supplementary to those set forth herein, are specifically incorporated herein by reference.
[0337] U.S. Pat. No. 4,196,265
[0338] U.S. Pat. No. 4,554,101
[0339] U.S. Pat. No. 4,683,195
[0340] U.S. Pat. No. 4,683,202
[0341] U.S. Pat. No. 4,800,159
[0342] U.S. Pat. No. 4,883,750
[0343] U.S. Pat. No. 5,279,721
[0344] U.S. Pat. No. 5,354,855
[0345] U.S. Pat. No. 5,792,453
[0346] U.S. Pat. No. 5,994,131
[0347] U.S. Pat. No. 6,100,242
[0348] U.S. Pat. No. 6,406,921
[0349] U.S. Pat. No. 6,457,809
[0350] Angel et al., Mol. Cell. Biol., 7:2256, 1987.
[0351] Angel et al., Cell, 49:729, 1987b.
[0352] Angel et al., Mol. Cell. Biol., 7:2256, 1987a.
[0353] Atchison and Perry, Cell, 46:253, 1986.
[0354] Atchison and Perry, Cell, 48:121, 1987.
[0355] Auluck et al., Science, 295(5556):865-868, 2002.
[0356] Baichwal and Sugden, In: Gene Transfer, Kucherlapati (Ed.), NY, Plenum Press, 117-148, 1986.
[0357] Banerji et al., Cell, 27(2 Pt 1):299-308, 1981.
[0358] Banerji et al., Cell, 33(3):729-740, 1983.
[0359] Barany and Merrifield, In: The Peptides, Gross and Meienhofer (Eds.), Academic Press, NY, 1-284, 1979.
[0360] Belenky et al., J. Sleep Res., 12(1):1-12, 2003.
[0361] Berkhout et al., Cell, 59:273-282, 1989.
[0362] Blanar et al., EMBO J., 8:1139, 1989.
[0363] Bodine and Ley, EMBO J., 6:2997, 1987.
[0364] Borbély and Achermann, J. Biol. Rhythms, 14(6):557-568, 1999.
[0365] Boshart et al., Cell, 41:521, 1985.
[0366] Bosze et al., EMBO J., 5(7):1615-1623, 1986.
[0367] Braddock et al., Cell, 58:269, 1989.
[0368] Bulla and Siddiqui, J. Virol., 62:1437, 1986.
[0369] Campbell and Villarreal, Mol. Cell. Biol., 8:1993, 1988.
[0370] Campere and Tilghman, Genes and Dev., 3:537, 1989.
[0371] Campo et al., Nature, 303:77, 1983.
[0372] Capaldi et al., Biochem. Biophys. Res. Comm., 74(2):425-433, 1977.
[0373] Celander and Haseltine, J. Virology, 61:269, 1987.
[0374] Celander et al., J. Virology, 62:1314, 1988.
[0375] Chandler et al., Cell, 33:489, 1983.
[0376] Chang et al., Hepatology, 14:134A, 1991.
[0377] Chang et al., Mol. Cell. Biol., 9:2153, 1989.
[0378] Chatterjee et al., Proc. Nat'l. Acad. Sci. USA, 86:9114, 1989.
[0379] Chen and Okayama, Mol. Cell Biol., 7(8):2745-2752, 1987.
[0380] Choi et al., Cell, 53:519, 1988.
[0381] Cirelli C. Bioessays, 25(10):940-949, 2003.
[0382] Coffin, In: Virology, Fields et al. (Eds.), Raven Press, NY, 1437-1500, 1990.
[0383] Cohen et al., J. Cell. Physiol., 5:75, 1987.
[0384] Costa et al., Mol. Cell. Biol., 8:81, 1988.
[0385] Couch et al., Am. Rev. Resp. Dis., 88:394-403, 1963.
[0386] Coupar et al., Gene, 68:1-10, 1988.
[0387] Cripe et al., EMBO J., 6:3745, 1987.
[0388] Culotta and Harner, Mol. Cell. Biol., 9:1376, 1989.
[0389] Dandolo et al., J. Virology, 47:55-64, 1983.
[0390] De Villiers et al., Nature, 312(5991):242-246, 1984.
[0391] Deschamps et al., Science, 230:1174-1177, 1985.
[0392] Dubensky et al., Proc. Nat'l. Acad. Sci. USA, 81:7529-7533, 1984.
[0393] Edbrooke et al., Mol. Cell. Biol., 9:1908, 1989.
[0394] Edlund et al., Science, 230:912-916, 1985.
[0395] EPO 0 273 085
[0396] EPO 320 308
[0397] Fechheimer et al., Proc. Nat'l. Acad. Sci. USA, 84:8463-8467, 1987.
[0398] Feng and Holland, Nature, 334:6178, 1988.
[0399] Ferkol et al., FASEB J., 7:1081-1091, 1993.
[0400] Firak and Subramanian, Mol. Cell. Biol., 6:3667, 1986.
[0401] Fire et al., Nature, 391(6669):806-811, 1998.
[0402] Foecking and Hofstetter, Gene, 45(1):101-105, 1986.
[0403] Forster and Symons, Cell, 49(2):211-220, 1987.
[0404] Fraley et al., Proc. Nat'l. Acad. Sci. USA, 76:3348-3352, 1979.
[0405] Freifelder, In: Physical Biochemistry Applications to Biochemistry and Molecular Biology, 2nd Ed. Wm. Freeman and Co., NY, 1982.
[0406] Friedmann, Science, 244:1275-1281, 1989.
[0407] Fujita et al., Cell, 49:357, 1987.
[0408] Gerlach et al., Nature (London), 328:802-805, 1987.
[0409] Ghosh and Bachhawat, In: Liver Diseases, Targeted Diagnosis and Therapy Using Specific Receptors and Ligands, Wu et al. (Eds.), Marcel Dekker, NY, 87-104, 1991.
[0410] Ghosh-Choudhury et al., EMBO J., 6:1733-1739, 1987.
[0411] Gilles et al., Cell, 33:717, 1983.
[0412] Gloss et al., EMBO J., 6:3735, 1987.
[0413] Godbout et al., Mol. Cell. Biol., 8:1169, 1988.
[0414] Gomez-Foix et al., J. Biol. Chem., 267:25129-25134, 1992.
[0415] Goodboum and Maniatis, Proc. Nat'l. Acad. Sci. USA, 85:1447, 1988.
[0416] Goodboum et al., Cell, 45:601, 1986.
[0417] Gopal, Mol. Cell Biol., 5:1188-1190, 1985.
[0418] Graham and Prevec, In: Methods in Molecular Biology: Gene Transfer and Expression Protocol, Murray (Ed.), Humana Press, Clifton, N.J., 7:109-128, 1991.
[0419] Graham and Van Der Eb, Virology, 52:456-467, 1973.
[0420] Graham et al., J. General Virology, 36:59-74, 1977.
[0421] Greene et al., Immunology Today, 10:272, 1989
[0422] Grishok et al., Science, 287:2494-2497, 2000.
[0423] Grosschedl and Baltimore, Cell, 41:885, 1985.
[0424] Grunhaus et al., Seminar in Virology, 200(2):535-546, 1992.
[0425] Haslinger and Karin, Proc. Nat'l. Acad. Sci. USA, 82:8572, 1985.
[0426] Hauber and Cullen, J. Virology, 62:673, 1988.
[0427] Hen et al., Nature, 321:249, 1986.
[0428] Hensel et al., Lymphokine Res., 8:347, 1989.
[0429] Hermonat and Muzycska, Proc. Nat'l. Acad. Sci. USA, 81:6466-6470, 1984.
[0430] Herr and Clarke, Cell, 45:461, 1986.
[0431] Hersdorffer et al., DNA Cell Biol., 9:713-723, 1990.
[0432] Herz and Gerard, Proc. Nat'l. Acad. Sci. USA, 90:2812-2816, 1993.
[0433] Hirochika et al., J. Virol., 61:2599, 1987.
[0434] Hirsch et al., Mol. Cell. Biol., 10:1959, 1990.
[0435] Holbrook et al., Virology, 157:211, 1987.
[0436] Holley et al., Bioassays, 19:218-284, 1997.
[0437] Holley et al., Bioassays, 19:218-284, 1997.
[0438] Horlick and Benfield, Mol. Cell. Biol., 9:2396, 1989.
[0439] Horwich et al. J. Virol., 64:642-650, 1990.
[0440] Huang et al., Cell, 27:245, 1981.
[0441] Huber et al., Neuroreport., 11(15):3321-3325, 2000.
[0442] Huber et al., Sleep 27:628-39, 2004.
[0443] Hug et al., Mol. Cell. Biol., 8:3065, 1988.
[0444] Hwang et al., Mol. Cell. Biol., 10:585, 1990.
[0445] Imagawa et al., Cell, 51:251, 1987.
[0446] Imbra and Karin, Nature, 323:555, 1986.
[0447] Imler et al., Mol. Cell. Biol., 7:2558, 1987.
[0448] Imperiale and Nevins, Mol. Cell. Biol., 4:875, 1984.
[0449] Innis et al., PCR Protocols, Academic Press, Inc., San Diego Calif., 1990.
[0450] Jakobovits et al., Mol. Cell. Biol., 8:2555, 1988.
[0451] Jameel and Siddiqui, Mol. Cell. Biol., 6:710, 1986.
[0452] Jaynes et al., Mol. Cell. Biol., 8:62, 1988.
[0453] Johnson et al., In: Biotechnology And Pharmacy, Pezzuto et al. (Eds.), Chapman and Hall, NY, 1993.
[0454] Johnson et al., Mol. Cell. Biol., 9:3393, 1989.
[0455] Jones and Shenk, Cell, 13:181-188, 1978.
[0456] Joyce, Nature, 338:217-244, 1989.
[0457] Kadesch and Berg, Mol. Cell. Biol., 6:2593, 1986.
[0458] Kaneda et al., Science, 243:375-378, 1989.
[0459] Karin et al., Mol. Cell. Biol., 7:606, 1987.
[0460] Karlsson et al., EMBO J., 5:2377-2385, 1986.
[0461] Katinka et al., Cell, 20:393, 1980.
[0462] Kato et al, J. Biol. Chem., 266:3361-3364, 1991.
[0463] Kawamoto et al., Mol. Cell. Biol., 8:267, 1988.
[0464] Ketting et al., Cell, 99:133-141, 1999.
[0465] Kiledjian et al., Mol. Cell. Biol., 8:145, 1988.
[0466] Kim and Cook, Proc. Nat'l. Acad. Sci. USA, 84(24):8788-8792, 1987.
[0467] Klamut et al., Mol. Cell. Biol., 10:193, 1990.
[0468] Klein et al., Nature, 327:70-73, 1987.
[0469] Koch et al., Mol. Cell. Biol., 9:303, 1989.
[0470] Kriegler and Botchan, In: Eukaryotic Viral Vectors, Gluzman (Ed.), Cold Spring Harbor: Cold Spring Harbor Laboratory, N.Y., 1982.
[0471] Kriegler and Botchan, Mol. Cell. Biol., 3:325, 1983.
[0472] Kriegler et al., Cell, 38:483, 1984.
[0473] Kriegler et al., Cell, 53:45, 1988.
[0474] Kuhl et al., Cell, 50:1057, 1987.
[0475] Kunz et al., Nucl. Acids Res., 17:1121, 1989.
[0476] Kyte and Doolittle, J. Mol. Biol., 57(1):105-32, 1982.
[0477] Larsen et al., Proc Nat'l Acad. Sci. USA., 83:8283, 1986.
[0478] Laspia et al., Cell, 59:283, 1989.
[0479] Latimer et al., Mol. Cell. Biol., 10: 760, 1990.
[0480] Le Gal La Salle et al., Science, 259:988-990, 1993.
[0481] Lee et al., Nature, 294:228, 1981.
[0482] Lee et al., Nucleic Acids Res., 12:4191-206, 1984.
[0483] Levinson et al., Nature, 295:79, 1982.
[0484] Levrero et al., Gene, 101: 195-202, 1991.
[0485] Liao et al., Proc. Acad. Sci. USA, 97(7):3347-51, 2000.
[0486] Liguori et al. Brain, 124(Pt 12):2417-26, 2001.
[0487] Lin and Avery, Nature, 402:128-129, 1999.
[0488] Lin et al., Mol. Cell. Biol., 10:850, 1990.
[0489] Lindsley & Zimm, In Genome of Drosophila Melanogaster, Academic Press, 1992.
[0490] Littleton and Ganetzky, Neuron., 26(1):35-43, 2000.
[0491] Luria et al., EMBO J., 6:3307, 1987.
[0492] Lusky and Botchan, Proc. Nat'l Acad. Sci. USA, 83:3609, 1986.
[0493] Lusky et al., Mol. Cell. Biol., 3:1108, 1983.
[0494] Macejak and Sarnow, Nature, 353:90-94, 1991.
[0495] Majors and Varmus, Proc. Nat'l Acad. Sci. USA, 80:5866, 1983.
[0496] Mann et al., Cell, 33:153-159, 1983.
[0497] Markowitz et al., J. Virol., 62:1120-1124, 1988.
[0498] McNeall et al., Gene, 76:81, 1989.
[0499] Merrifield, Science, 232(4748):341-347, 1986.
[0500] Michel and Westhof, J. Mol. Biol., 216:585-610, 1990.
[0501] Miksicek et al., Cell, 46:203, 1986.
[0502] Montgomery et al., Proc. Nat'l Acad. Sci. USA, 95:155-2-15507, 1998.
[0503] Mordacq and Linzer, Genes and Dev., 3:760, 1989.
[0504] Moreau et al., Nucl. Acids Res., 9:6047, 1981.
[0505] Muesing et al., Cell, 48:691, 1987.
[0506] Ng et al., Nuc. Acids Res., 17:601, 1989.
[0507] Nicolas and Rubenstein, In: Vectors: A survey of molecular cloning vectors and their uses, Rodriguez and Denhardt (Eds.), Stoneham: Butterworth, 494-513, 1988.
[0508] Nicolau and Sene, Biochim. Biophys. Acta, 721:185-190, 1982.
[0509] Nicolau et al., Methods Enzymol., 149:157-176, 1987.
[0510] Nitz et al., Curr. Biol., 12(22):1934-1940, 2002.
[0511] Ondek et al., EMBO J., 6:1017, 1987.
[0512] Ornitz et al., Mol. Cell. Biol., 7:3466, 1987.
[0513] Pace-Schott and Hobson, Nat. Rev. Neurosci., 3(8):591-605, 2002.
[0514] Palmiter et al., Nature, 300:611, 1982.
[0515] Paskind et al., Virology, 67:242-248, 1975.
[0516] PCT Appln. WO 84/03564
[0517] PCT Appln. WO 90/07641
[0518] Pech et al., Mol. Cell. Biol., 9:396, 1989.
[0519] Pelletier and Sonenberg, Nature, 334(6180):320-325, 1988.
[0520] Perales et al., Proc. Nat'l Acad. Sci. USA, 91:4086-4090, 1994.
[0521] Perez-Stable and Constantini, Mol. Cell. Biol., 10:1116, 1990.
[0522] Picard and Schaffner, Nature, 307:83, 1984.
[0523] Pignon et al., Hum. Mutat., 3:126-132, 1994.
[0524] Pinkert et al., Genes and Dev., 1:268, 1987.
[0525] Pinto et al., Braz. J. Med. Biol. Res., 35(5):599-604, 2002.
[0526] Ponta et al., Proc. Nat'l Acad. Sci. USA, 82:1020, 1985.
[0527] Porton et al., Mol. Cell. Biol., 10:1076, 1990.
[0528] Potter et al., Proc. Nat'l Acad. Sci. USA, 81:7161-7165, 1984.
[0529] Putz and Heisenberg, Learn Mem., 9(5):349-359, 2002.
[0530] Queen and Baltimore, Cell, 35:741, 1983.
[0531] Quinn et al., Mol. Cell. Biol., 9:4713, 1989.
[0532] Racher et al., Biotechnology Techniques, 9:169-174, 1995.
[0533] Ragot et al., Nature, 361:647-650, 1993.
[0534] Redondo et al., Science, 247:1225, 1990.
[0535] Reinhold-Hurek and Shub, Nature, 357:173-176, 1992.
[0536] Reisman and Rotter, Mol. Cell. Biol., 9:3571, 1989.
[0537] Reiter et al., Genome Res., 11(6):1114-1125, 2001.
[0538] Remington's Pharmaceutical Sciences, 15^{th} ed., pages 1035-1038 and 1570-1580, Mack Publishing Company, Easton, Pa., 1980.
[0539] Renan, Radiother. Oncol., 19:197-218, 1990.
[0540] Resendez Jr. et al., Mol. Cell. Biol., 8:4579, 1988.
[0541] Rich et al., Hum. Gene Ther., 4:461-476, 1993.
[0542] Ridgeway, In: Vectors: A survey of molecular cloning vectors and their uses, Rodriguez and Denhardt (Eds.), Stonehan:Butterworth, 467-492, 1988.
[0543] Ripe et al., Mol. Cell. Biol., 9:2224, 1989.
[0544] Rippe et al., Mol. Cell Biol., 10:689-695, 1990.
[0545] Rittling et al., Nuc. Acids Res., 17:1619, 1989.
[0546] Rorth et al., Development, 125(6):1049-1057, 1998.
[0547] Rosen et al., Cell, 41:813, 1988.
[0548] Rosenfeld et al., Cell, 68:143-155, 1992.
[0549] Rosenfeld et al., Science, 252:431-434, 1991.
[0550] Roux et al., Proc. Nat'l Acad. Sci. USA, 86:9079-9083, 1989.
[0551] Sakai et al., Genes and Dev., 2:1144, 1988.
[0552] Sambrook et al., In: Molecular cloning, Cold Spring Harbor Laboratory Press, Cold Spring Harbor, N.Y., 2001.
[0553] Saper et al., Trends Neurosci., 24(12):726-731, 2001.
[0554] Sarver et al., Science, 247:1222-1225, 1990.
[0555] Satake et al., J. Virology, 62:970, 1988.
[0556] Scanlon et al., Proc. Nat'l Acad. Sci. USA, 88:10591-10595, 1991.
[0557] Schaffner et al., J. Mol. Biol., 201:81, 1988.
[0558] Searle et al., Mol. Cell. Biol., 5:1480, 1985.
[0559] Sharp and Marciniak, Cell, 59:229, 1989.
[0560] Sharp and Zamore, Science, 287:2431-2433, 2000.
[0561] Sharp, Genes Dev., 13:139-141, 1999.
[0562] Shaul and Ben-Levy, EMBO J., 6:1913, 1987.
[0563] Shaw et al., Science., 287(5459):1834-1837, 2000.
[0564] Sherman et al., Mol. Cell. Biol., 9:50, 1989.
[0565] Sleigh and Lockett, J. EMBO, 4:3831, 1985.
[0566] Spalholz et al., Cell, 42:183, 1985.
[0567] Spandau and Lee, J. Virology, 62:427, 1988.
[0568] Spandidos and Wilkie, EMBO J., 2:1193, 1983.
[0569] Spradling et al., Genetics, 153(1):135-177, 1999.
[0570] Stephens and Hentschel, Biochem. J, 248:1, 1987.
[0571] Stewart and Young, In: Solid Phase Peptide Synthesis, 2d. ed., Pierce Chemical Co., 1984.
[0572] Stratford-Perricaudet and Perricaudet, In: Human Gene Transfer, Eds, Cohen-Haguenauer and Boiron, John Libbey Eurotext, France, 51-61, 1991.
[0573] Stratford-Perricaudet et al., Hum. Gene. Ther., 1:241-256, 1990.
[0574] Stuart et al., Nature, 317:828, 1985.
[0575] Sullivan and Peterlin, Mol. Cell. Biol., 7:3315, 1987.
[0576] Swartzendruber and Lehman, J. Cell. Physiology, 85:179, 1975.
[0577] Tabara et al., Cell, 99:123-132, 1999.
[0578] Takebe et al., Mol. Cell. Biol., 8:466, 1988.
[0579] Tam et al., J. Am. Chem. Soc., 105:6442, 1983.
[0580] Tavernier et al., Nature, 301:634, 1983.
[0581] Taylor and Kingston, Mol. Cell. Biol., 10:165, 1990a.
[0582] Taylor and Kingston, Mol. Cell. Biol., 10:176, 1990b.
[0583] Taylor et al., J. Biol. Chem., 264:15160, 1989.
[0584] Temin, In: Gene Transfer, Kucherlapati (Ed.), NY, Plenum Press, 149-188, 1986.
[0585] Thiesen et al., J. Virology, 62:614, 1988.
[0586] Top et al., J. Infect. Dis., 124:155-160, 1971.
[0587] Treisman, Cell, 42:889, 1985.
[0588] Tronche et al., Mol. Biol. Med., 7:173, 1990.
[0589] Trudel and Constantini, Genes and Dev. 6:954, 1987.
[0590] Tur-Kaspa et al., Mol. Cell Biol., 6:716-718, 1986.
[0591] Tyndell et al., Nuc. Acids. Res., 9:6231, 1981.
[0592] Van Dongen et al., J. Sleep Res., 12(3): 181-187, 2003.
[0593] Vannice and Levinson, J. Virology, 62:1305, 1988.
[0594] Varmus et al., Cell, 25:23-36, 1981.
[0595] Vasseur et al., Proc Nat'l Acad. Sci. U.S.A., 77:1068, 1980.
[0596] Wagner et al., Proc. Nat'l Acad. Sci. USA 87(9):3410-3414, 1990.
[0597] Wang and Calame, Cell, 47:241, 1986.
[0598] Weber et al., Cell, 36:983, 1984.
[0599] Weinberger et al. Mol. Cell. Biol., 8:988, 1984.
[0600] Winoto and Baltimore, Cell 59:649, 1989.
[0601] Wong et al., Gene, 10:87-94, 1980.
[0602] Wu and Wu, Adv. Drug Delivery Rev., 12:159-167, 1993.
[0603] Wu and Wu, Biochemistry, 27:887-892, 1988.
[0604] Wu and Wu, J. Biol. Chem., 262:4429-4432, 1987.
[0605] Wu et al., Proc. Nat'l Acad. Sci. USA, 86(8):2757-2760, 1989.
[0606] Wustmann and Heisenberg, Learn Mem., 4(4):328-336, 1997.
[0607] Wustmann et al., J. Comp. Physiol., 179(3):429-436, 1996.
[0608] Yang et al., Proc. Nat'l Acad. Sci. USA, 87:9568-9572, 1990.
[0609] Yutzey et al. Mol. Cell. Biol., 9:1397, 1989.
[0610] Zars et al., Science, 288(5466):672-675, 2000.
[0611] Zelenin et al., FEBS Lett., 280:94-96, 1991.
[0612] Zhou et al., J. Gen. Physiol. 111(4):555-63, 1998.

The application's sequence listing, which the Patent Office published only in electronic form, follows.

SEQUENCE LISTING (55 sequences)

SEQ ID NO: 1 - DNA, 792 bp, Drosophila melanogaster
ttaactgtggcactaaccagcgttaatgcggagaatatgtcgcggcacgacatgcttcagtgggtgaacaacatggtccacggccacttcaagaagatcgaagagctgtgctcaggtaagacttataaagagcataaaattgggcaatgctgctaagttctatggtcttctccaggtgctgcctactgccagatgatggagatgatctttcccaactgcattaacctgaagcgcgtcaagatgaccgccaaactagagcacgagtatctacacaatcttaggctcttccaggaagccttcaatcgcttgaagctggacaaaacggtaccaatcgatcgactgatcaagggtcgcttccaggacaactttgagttcctgcagtggttcaagaagttcttcgactcgcaggctccgggcttggagaacattaagtcgctggccaatgcgccgttggcaaagcccataaagccgcgccaattcgccaaggagcgatcaccagtcaacgccaatgatgatgcgctcaaagagctgattgatgaaatgaagaacctaagcctgaagcgggaggacatcatggaggccagcaatcagatctacaacaaactgcgcctggtcgaggatttggtcaacgacatgatcaacaacaaccagctagttgagttgtgcaaacgcattcaagcggtgctctacaaaacgatagatggtgaaatcaacgaggaacccgtcgaggttaatgaggataatggtgatgaaggcgccgaacacgcggatcccaatgacggattatattag

SEQ ID NO: 2 - protein, 231 aa, Drosophila melanogaster
MSRHDMLQWVNNMVHGHFKKIEELCSGAAYCQMMEMIFPNCINLKRVKMTAKLEHEYLHNLRLFQEAFNRLKLDKTVPIDRLIKGRFQDNFEFLQWFKKFFDSQAPGLENIKSLANAPLAKPIKPRQFAKERSPVNANDDALKELIDEMKNLSLKREDIMEASNQIYNKLRLVEDLVNDMINNNQLVELCKRIQAVLYKTIDGEINEEPVEVNEDNGDEGAEHADPNDGLY

SEQ ID NO: 3 - DNA, 1688 bp, Drosophila melanogaster
agtggaatcgtagctgctatccgagacagtctgagtggaaccgctgataggaacagatgggtgtcactgttaaaattctggtcttgatactggccattgccggtgggctggtctataggaatgtgacccaactatgggcggacttgcccgcaccaaagttggatccccaggagtggtggggcgatgaggcgcagcccaaggattacgaggcctatttgaagaacaattcggaggtgataggcaataggcttagttatccggataaggtaagtgggggtctatccattattatgtactatatactaactcataccatgtgcagaccattgctgatttgaaagagcgtctcaatcgcaccctgcgccttacgcctccgctcgagggcgtggcttttgagtacggattcaatacgaattaccttaaggaggtcgtggagtactggcgcgatgactacctgccgcgttggcgcgaacgcgaggtgttcctttggcagttcaatcacttcaccaccgatattcaggggtaagataaggtgcccacttatcatatgcacagatagtaacgatggggttttaggctacgcacacacttcctccacctgatggtttatgatgacaacaaagtgggtaagaaacactatccggtgttgctgctccacggatggccgggatcggtgcgggagttttacgatttcatacatttgctgcatcagaccaatctggacaataataacaagtacatctttaacgtcgtggttccgagtttaccaggttatggctggtcacaggtgggttttgtccaatctacgtagtgtattataggcttatctgtctcttatcctgcagggcacctccagaaaaggactgggtcccgctcaagtggcggtgatgatgaggaatcttatgctgcgtttgggatacaacaaattctttatccagggtggagactggggcagcattattggcagcaacattgccaccttgtatccggaaaacgtgctgggctaccactcgaacatgtgcaacaatttgagtccgaagtcgctggctaagggtttagtggccgaattttggcccagtttgtttgtgccctctggctttgaagatttcttctttcccaagtctaacgagatgagatacctaatggaggagagtggctacttccacatccaggccaccaaaccggacaccatcggagccgccctcaccgataacccagtgggtctggccgcctacattctggagaagttctccacgtggacaaatcccagctaccgatctctgccagatggaggactcactaagcgctacaaaatggatgccctgctggacaacctgatgatctactacctgaccaattcgattaccacctcccagcgtctctatgccgagcagtatgcccaggcacagcgggacctgcacctggatcgggttcccacccgagtgccaactggatgtgcccgtttcaagagcgacattatgcagttcctggatgtccagttgaaggataagtacacgaacctagtgcacagcacttaccacaaaaagggcgggcactttgccgctctagaggttccaaaggttctatacaaggattttatagactttgtcgaaacggtggaacgtaagtttaaaattaagactctgtagatcttccaataaaagcttaattgttacaaaaaaaaatta

SEQ ID NO: 4 - protein, 474 aa, Drosophila melanogaster
MGVTVKILVLILAIAGGLVYRNVTQLWADLPAPKLDPQEWWGDEAQPKDYEAYLKNNSEVIGNRLSYPDKTIADLKERLNRTLRLTPPLEGVAFEYGFNTNYLKEVVEYWRDDYLPRWREREVFLWQFNHFTTDIQGLRTHFLHLMVYDDNKVGKKHYPVLLLHGWPGSVREFYDFIHLLHQTNLDNNNKYIFNVVVPSLPGYGWSQGTSRKGLGPAQVAVMMRNLMLRLGYNKFFIQGGDWGSIIGSNIATLYPENVLGYHSNMCNNLSPKSLAKGLVAEFWPSLFVPSGFEDFFFPKSNEMRYLMEESGYFHIQATKPDTIGAALTDNPVGLAAYILEKFSTWTNPSYRSLPDGGLTKRYKMDALLDNLMIYYLTNSITTSQRLYAEQYAQAQRDLHLDRVPTRVPTGCARFKSDIMQFLDVQLKDKYTNLVHSTYHKKGGHFAALEVPKVLYKDFIDFVETVERKFKIKTL

SEQ ID NO: 5 - DNA, 7078 bp, Drosophila melanogaster
agtcgcaggcgcagcgccgctctgacacgttcgctcttgatcgcgcgcgtaagttcgagatcaacaattaacggtgcgtagccgcctcctgaaaccctgcaagtggaagcgagacggccaatggcaagaaatagacgcgtgctgtggaagcaaaaacaacacaaaagcagcggagaaacgatcacagatttaaacaatatttatactgtcgcgtcgctgcaattgaaattgatttcaatttaaaagtatttgaagaaaaattagacacgtgccgtgaagtgcaaatggaaaaagtgttagaaaagcgaatgaattagtaaacaacgtcaactgcaagaaaaagtaagaaaaataaggaatgtcagtgtagaaagagagaaagagcgcgcgagagagttcaacttttttcatttcctctgtagataagtttttttaagcaaacataaaaagaaccacataatagttgttaactccatgaggagcttaaaattgtgacgcattgcgatgaaatcgcaaaaccgggggaaaaaaatcgtatgaaaagtgtagccgcgcaacgaattatgttcatacatatttacatacatacatacatacatacatatgtatattttgttggcacattgcactgtgttgctggttatttttaggctaaaagagcaaataaggcaagcatgatgagcaaacacatagaaaacattgtcaacaggttgcggaagtgacgctcaaggttcaaggataaaccaagtgttaatatttcatgttcgctagtgtggaaaatcgcaattgttcgaaattcgcgtgattgatgtatgaacaaatgattaggcggtatgtgagcttcataatctggtgtagtaaaccacacaacaatcagagcgcaagagcgggcgttggtggggggtgggcgtggcatgtggggtggctttgttgtagataaagaagcaaaaaagcacacaacaaaaacgggttttactcctaacctcgctacgtgtgcattagtaaaaagaaataagtcatcggccgtagtacgtgtgtgccacaatatgtataaaaacacctatatgtatatttaaaaatcgttgatttatcaacagtaatggacgtaactaaggccaaaagcgcctcagccagcggttgctagccagccccaagaagtgtaaacaatattgactataacgcccccacttcccgcccttgcgcactgcgattttgatggttgtgtcagggtatggaatacggagtatgaaacgtgttttcgatccagtcccacactcgcgaatcaaaacaaataatactcgtggaatgtgccaccacagtgaatcacagactttccaacctttaaacattgctaaaaaatatttatgttctgagtcagcaaataatactaataagttcggagtcagcaaaccgaaaaaaaaactccattcaatgggagtaatacagtgttatatgtatgcatgtcatgtggttttagtgtcagaaatcgctattagaaaaaacaaattttcagagtgaaatcttatcagctacgaaggattgcgtttatataaattgcattttgtagctgaaatccctagggaaattgatgttttagtactgaccttagtatactaacaacaccgttttcctaacagggtcatgctagacttagcatttcaacggttctatgccaacggtggcaagtgtgccaaaaaagacatattagtgactaagcgttgataatcagtgttctatatatgtatgtatgtatggtacaaaaacagtactgtctgagtatagattccgtggagtgataactgaatcttcatggtccgctggcacctgacgtaattcctgtattgagaagagtattatatttatttaagccagcccttctgaccggtttacttcaaacaacccccaaaaacaagtgatacatatatgaacatttaagcaattatttcgttaatttacaaatgtacagtcttacatctgtaatgtggatgtaatgatctcacctttattcgaatttctgctctacatagtatctagtttctagaataaatgtagcacagaaaaggatttgcttaacaaaaattattaggctgtgcttaatttcatattgtaaatgttacactgtagcttgcagttacttatgtacatacatgtacatacaaatgcttgtacttgtaggtattcattttagtacatacatatgccatacatacgtaagtatgtacatattaagtttgcggtttggccagtaccaagtaaaaactttattacaattagacacaaaatgtgtataattacgccgcagttaagcattatgatcgccacttatgcgtcgccactctcgcctctctctctccctctcaccggttctcttcacaattctctttctccggcgcatttcccgatcctcatgaaatcgaattcggctggctagcctgctgggccgccgaaagtgtgcgcgtgcgataagacatactgtacagtggtctctctgttagcgataagcccgcattcctatttcccaccgccactctcacttacttactctctgcctttctctccctagacgccaataacgggaacgcagtcgatgcgagggttccatgctcagtgcgcaacaagagatcgatcgaggaagacgccctgcaaacaaagaacatcaatttacagcaccgccaccaagactcaggcgcagctccaccaagatgacatcacggacgcgccactgtgcccgactggggatcgttctccttgggatctgttgcatcgccagcggaatttacctcttccgcaactggatcgatatgtttacacgcatgcgcggccaggttggtactccactagatgtatatatgtatttattagaagcaatacttgcaatcggtttcaacctatcttatcgatattgattgccttggattctcagacctttgggttaagtttcgcaagccggcaaattggcaatgtgtgcagaggtcaactgggagactcatttgcataccacttggattgggaggcaacaattttttccattgatttaaagcaaagacgaacgcaaagacactgaaaattgactgtgtgcaggtgttcgagtaattccaaatcaccccaagccaatagataagataaggactaacaacaggcgaaataataccttatagagaacattttgtaacgttattgtttgggggtggtaaaaatataaaaatcttataagatcctaaacatttgcatgtgcctttaattagcatgttaatgctatagttgatatgttttttttcttctgtatgtagagtgcttagtcacggcagttaaaatctcattgcaatgcgttctccttaatcgttgtgatcgttaaatggcaatgaacgaagagcgaggaaccttgttgaaatgagcatttaatcttgcacgaattttttttagaatgatgtcaagttttatattaacgcgaattttgtaattttttttttcaatttccaaataatcatcaatcaaattgataatattttggttagccaggtgtttttttgactcacgaaagtttcgatcgtgattcctattggcagtggcaactaaaaatagtaagtgattaattggctttatcaaaaagaaaagggcacacctgtcaatgtgaatcatgggtttcgatgcggggtcaataatccaacattgaaatgtatttcactttaatgtttttggtctctgggttggcggaaataccatccgaagtgttggagttgcggccgcgaaattgcaatgggtttctcgatatcttatcttggacaaaacctgaaaaataacccattttgcgatagccatgttcgattagacaacgctcttcagttccatacctacatactatatgaatatatggcaaaaaatgctcataaacggccataaccatccagaaccgacatgtgcatgtaaccgcacttttgcacgtccgatgaccctgaccgaacacctgtgctccatttcgatacgcaatccggcagacatgtgtaatccattaggattttacagggcttatgacgaatatggttgaaactgcttagaatctaattcaaacctatagcattttatcaatttagtcatttcctgtagctcagtcgcagttccaattataaagattataaggccctgggtcatacaaaatggtggccagtggtctgcgatctagacgatcgttattatgtctatcgttctggcttacaatgattgatggctgataagagcaatcatagcacctgaaatttcgcagagatagagcccaacaatgtagcgagaaagtgcatttcaagcgtcactatcactattagttttatgcaaaatagtgcccatatatatggcacttttaatatgcacaatactacatgtgtatgtgccagtcaatcatgaaagctccaatggataccaattgcacagatcatttgtgaactttgatcggttcttccatatgcacattggtcgcatactcggtgcgcaattgttcatcaacgaattcgacgtttaattgctgtgccaatttagcaaccagttatcctaaattatagcaaactcattatgtaaatcgattatcattgtattgtttgatcattgtatattttaataaaaatttttcattattataggaaatggccctgagccccaattcacgatcattcgagggctggaaggtgtcgccgctgcctttagacttcgatatatatctatttaactggaccaatccagatgacttctatgtgggatcgaacaagaagccacactttgagcaactgggaccctatcggtttcgagagaaacccgataaggtggacatcgaatggcacaatcataacgcctccgtatcatttcacaaaaagtcctggttctactttgatgctgccggcagcaacggaagtttatgggataaagtgactacggtcaacagcgtagcgcacgtaagttctcagaacatctctcaatctcaatgaaatctattaacatcttaattatttttaaacagtctgctgctagacgtgcggccgtcgactggtttgccagaactggcgttaacattgccaataaattatatagacagggagtgaccattacgaaaacagttgatgaaatgcttttcaagggctacgagcatccattcataagcgtgggcaagctgttgagacctcaggatgttccctacaaacgtataggctaccattacccacgaaatggcagttccgagttcgatggtgatatcaacatgtttacaggagctgatgatatcgctaaaatgggtcagattcatacgtggaataatttgacgcatactggagcctttgagggcacctgcgggcaggtgcacggctcgatgggcgaattctttccgcccaatcttggcaccaaagacaccgtctacatgtacatgcccaagatgtgtcgtgctataccattggactacgtggaaactgtgaccgtgcacggcgtgaccgcctacaaattcagtggcacccggcacgctgtggacaatggcactctatatccggatacccgttgctattgcgtcggaggaaagtgtatgcccagcggtgtgatcaatatcggaccctgctcctttaacgcatccgtctacatgtcctttccgcacttttacatggcggatccaagctatctggaggccatcgagggtttgcgaccagaacgcgagaagcacgagttcttcatggccctggagcccaatgcgggcgtgccaatggacgtgggtggtggctttcaggccaactactacatggagccaattccgggtattacgtaagtaacttgacctttacataagccttttccttacataaactaatattttcattttctttcagcttgtatgagaatgtcccgacggtcatgatacccatgatgtggtgcgaggagcgcgtacgcgtatcagaggaaattgccgcagacattgcgcttgttccgctaattgtcctgctggggcagatagtaaccggcatccttttggcgggcggtcttatatgcacctgctggtacccgacgcgacaagtgacgcacttttgtcacagcgatccaaaggcgaaggccagtgtcctgcgaccactgaacgcctttggtgtaaattcgtcggcagccacagcgccggtggcccaactattccggaacaacattagttcatcgggcaacgagcgtgtgggagtgcgcctactggattataatcgcgattctggcataagactggagagtggtaccatggaaagctcgcacagggagcgtctgatcagcgaggactcgcccgatgttgtagttagataatacatgcgttggcatcaagccattctgacggtgccgccaacgatcatctgcctgagactcatttacgtcgccgtagcttagaatagcttagaacaacgtgatgaaaccattctgccttagccaggctctaagaggctggaccaagttgctcatcgaggatgtcgttccaattcacgtcacataccaccacattacctaccacgcatgccccaatcgcattaggagttccctcaacacatctgcacgctttgcggacagcgagagagatttataagattatttattttagtgccaaataacagcagaaaacgcaagcaaaaagtcattaactattttagtaggataaactaaattgtatatagagcgactcgcttagagcgccccattactcattttccttaattcttgaagtttaaactgcgcatgcccaaagtatttatatttatataataatgcataacatttgtagagcgatatttaagattttaatgcagattgatctgaagttatatagaaataatattgaacagagaacataggtagcgagaattgttgctcatttacataggtaggccgaaaaactaaaaattatagttgttgttttaagtcttgtacaaataacgctagcactgcaaagattacgcatatcctatgtacaaatgtcgatcagtgtaagatctaaatacctagattataaagcacagctgtgaaccccggaaatatttccaaaaattccttaagataaatgaatagaaaaaattattaaaatcaa

SEQ ID NO: 6 - protein, 589 aa, Drosophila melanogaster
MLSAQQEIDRGRRPANKEHQFTAPPPRLRRSSTKMTSRTRHCARLGIVLLGICCIASGIYLFRNWIDMFTRMRGQEMALSPNSRSFEGWKVSPLPLDFDIYLFNWTNPDDFYVGSNKKPHFEQLGPYRFREKPDKVDIEWHNHNASVSFHKKSWFYFDAAGSNGSLWDKVTTVNSVAHSAARRAAVDWFARTGVNIANKLYRQGVTITKTVDEMLFKGYEHPFISVGKLLRPQDVPYKRIGYHYPRNGSSEFDGDINMFTGADDIAKMGQIHTWNNLTHTGAFEGTCGQVHGSMGEFFPPNLGTKDTVYMYMPKMCRAIPLDYVETVTVHGVTAYKFSGTRHAVDNGTLYPDTRCYCVGGKCMPSGVINIGPCSFNASVYMSFPHFYMADPSYLEAIEGLRPEREKHEFFMALEPNAGVPMDVGGGFQANYYMEPIPGITLYENVPTVMIPMMWCEERVRVSEEIAADIALVPLIVLLGQIVTGILLAGGLICTCWYPTRQVTHFCHSDPKAKASVLRPLNAFGVNSSAATAPVAQLFRNNISSSGNERVGVRLLDYNRDSGIRLESGTMESSHRERLISEDSPDVVVR

SEQ ID NO: 7 - DNA, 637 bp, Drosophila melanogaster
tcgaaacggaaggaaaatcgctttaattctctgtgatctgtgtttgcgtgttgaactcgagttttcagttcgttgttatctgttcaatttcatttggatgtgcaattgccgacgctaaaaatatatacgtaacgcgtgcaagaaattgagagtattgcccgacgctcaactaaattacaaaaaagaaattttatttcatatataaacgccacgttctcgcgttctaacaaactccccaataaaaaacacactcaagcagcacattacatatactcgaccacgctgtataattagttactagccgttgatatttccaatacgccgcatagcaacaataaccatatcaaacatttcgataatctgatgtgacacaagtttttgcatcgaaatagccgtgtgtgtgtgtgtgtgtgtgtttggttcccattcgccgccaatcaaaccaatcgcattgagagtgtaatccgggaaaagttatacacacctaaacctgcgccttttcaatgtagcccttcatggataattaacacgtgagcgttgtgtgactatatagcaaaatcgtgttaaaatcgtgttcgcagtggctgaatttagcagcgatccaacgaatagtgtcatctcgaacccagacaccccc

SEQ ID NO: 8 - protein, 658 aa, Drosophila melanogaster
MLKVVGASWQKTRIGTYILIGAGLLVIGAFFIGYMERPEYDGTYCATALWTKQVGFQIENWKQQNDLVNIPTGVGRICYKDSVYENGWAQIEVETQRTYPDWVQAYAAGMLEGSLTWRNIYNQWSNTISSSCERDESTQKFCGWLRDLLTTNYHRLKRQTEKAENDHYWHQLHLFITQLEGLETGYKRGASRARSDLEEEIPFSDFLLMNAAADIQDLKIYYENYELQNSTEHTEEPGTDQPKNFFLPSATMLTKIVQEEESPQVLQLLFGHSTAGSYSSMLRIQKRYKFHYHFSSKLRSNTVPGVDITFTGYPGILGSTDDFYTIKGRHLHAIVGGVGIKNENLQLWKTVDPKKMVPLVARVMAANRISQNRQTWASAMSRHPFTGAKQWITVDLNKMKVQDNLYNVLEGDDKHDDAPVVLNEKDRTAIQQRHDQLRDMVWIAEQLPGMMTKKDVTQGFLVPGNTSWLANGVPYFKNVLELSGVNYSEDQQLTVADEEELTSLASVDKYLRTHGFRGDLLGSQESIAYGNIDLKLFSYNARLGISDFHAFAGPVFLRFQHTQPRTLEDEGQDGGVPPAASMGDERLSVSIEDADSLAEMELITERRSVRNDMRAIAMRKIGSGPFKWSEMSPVEEGGGHEGHPDEWNFDKVSPKWAW

SEQ ID NO: 9 - DNA, 6137 bp, Drosophila melanogaster
cgacattcgaagaagtggatctctgctgtccctgctctccgcacatccgcatcttcgtcgctacttcgtttgccactccgcatattcacatattcgcatccgcatattcgcgtccagtccactcttctctctgccgcgcgacccagtgcataagtgtgcgtgcatacgagcgtgtgtgtgtgtgtgtgtgtgtcatcgtcaactgtgaacgaccaacttttttaatatctcagcaaaatgcaacaaaaataaatgcaccacgggcatgaaaacaacaacagcacacagctccaacagtgaattctaccatctgaatttatcaactttttacgcaacaaaatatcaaaacaaaacaaagcgaaagaaaccctttttttaaatctcaaacctgtgacaaagtgagaaaatctaaaacaaaaaaaaaaaacagcaataaaccaaaatacaataaaatatctacaactcgctgctaaattagcaaaaggtatgtatagttcgagtaaagttgatttgccgtcggcacttcaagcaaagaattcaaattcaagtgaagtcatagtgaatatttttcgagatcagaggagtattttctaaaaagaaatcctggtgccataaaaatattacccattcaagaattgtgttatgaaataggaacgcaacaataggattcttttcgtggtaaataatgatcttgttaggatcacataggctgctagtggcattaatatggtattaccattttcatgggatctctggtgatgtgctgccatcttttacctctagtctatggattttcttataatatcctgactttgctaaattgaaaacagcttgttaatccaatgttcgtaaacccatttttgtctatttgctgcgtgagcttcgacgacaaaaaagtgatgtcttcgggggaaacgccaaatgtcaaagttgtaattaagatttttgtctgcggttttcgagctctgtttttctcgttgatgtccggaccatcggcgttgtcatctttggaccatcgcatgccccttgcatgccccttgtgcccatcgactcctgcttattataatgtactactattaacagcaactacaacagcaattatagccgccggattgctcacatctcggcatcttccatccccaactgccacacaccgtactccacagatcttggatctaccatctaccatctaaagcgtctcccaactctcggaattcttcaatcttgtcgtttcttgtcttgggtactttcaacattttgctgcctttgccactgccgataatcaaaaaacgtttcgtccgagagccatcaaaagttgtgattggtttttcccctacccccagctgcccaacatcaccccccctttcaccatcggtggcttaagacattttaagcgtttgacaaaaataattacccatgtacatgcatactcacctcgatctgtcgaccgcgtgcactgagagaaaatagagaggttgttattgttttccgttgcgccttattgtgctatgcaagattgttatgatgcttagatcttgaattgttttatattgaaatgttaaaagatctatatttttttttgagttgaatctcttttttaaaagattcttggaagataaaaaggtataggcaccttcaactcatatgatatagttaacttataatgatctagaaaattattgcaacatctttgggtcattctctatttcttgaatggtaacaatattttcggcacctagtcagaaactgattacttccaagtacctgacaattaagttttttttcccccctttttgctcttcttttttttttcttgcgctttcgcattttcgccgtgtgtacatacactcattttaatgctattgttgtcatcgttactaatgagccccataaaaagcgaccatctcctggcttcctgcaactgtgtgcgtgttacctgtatgcctgtatgtgtgagccatagtcgtatgtggttttcggcttaactttttagctggcattgggcaagcgaatgcgaatgtgtgttcgacttttgagatcgaatccagatagccagccacgacatcgcacacacgatcatcaccatcgtcatccgcatctcaccgcaattgtccccagttttgtgacgcccctgggttcggttcacttctttttttttttttttacccctgatttgtttctgtttttaacgtcaagtcgactgctcacaattacggtagcgaacggagtccacaataaaaaaaatgagctagctctggctttagctttgcttttggttttggttttggctttaactccgaccgatcggatccaaagtcgaagtccgacactgatcgccgcatgttgtcgtcgccgtcgacgttgtcagaggcgattttaatggccagaagaaccgaaaaagctgtaaaagatttcgctcgagtaaatgaggcaatgtgcacttacacaagtaatgcgccagtgttagtgtacagtgggccttggctacgacagaaattgggtgcataggaaccaaaatgataaagattaaacaaatgatgtagcgtcagtcactgggataccccttttgattatttcaaaatacaaaacatggcaactctagttgttctactgtactatcggctcgacatgaaagatatgccgccatcggtgtcgccgatataaatgttcgcttgtctgagttattgtaagcagtgtgtgtcttaccaataaatctagctggatttgcacaaagttggctaagctccttggaagctttcacttgggaatttcggtaatacacttgagatatgactttagagcgctttccaatgctatagattagtgcttttggcgtggcaatgcagtcatatgtacatatacattcgcctcagatattaatctatatcttaaggatatcgaatattaattaatgaaaaagccatttgaacagcaatggggtttttttttttttgaagcacacagctggcagccttaaagactttcttttaaatctggatttcagaatgtatcttacagcaatgaccaactaatcgctgtaatccactgattaattgagacccccccccaaaataaagttttctccccttgacttattcgaccgtcttgacttttcgcactctaattgcgcatcaatgaccactgcccaatgtcccaggtccaggagtcaatgtccatgtccccggcaccacagaccattcaacaatttgccctgctgactctcggcgataaggttgattccagtttcccagttgtagttgcgcaatcggatttgccccgcaaccctggcaatagttttcgattaggactgaccgattcactgacttcctgattgacactccctgattgacactcctaacgattcgtttctgtttcttgtttgttttccaggcaccaccagtcatcgccatcgccatcgccagcgcgaccatagaaacaaaatccaccacagacgacatggagcacataatgaatccgttcatgtcaccggcttatctgctgggccatggcccacattcccaccagcatgtgcactcccatctaccgtcacacccgcagccaaatgccgcctctccggccagctcacccggcggatccagtggctctggatcgggatcggcagcgggatcgggcactggatcaggttcatccttaaagcctcgtcgctggggctcaccgcccatcaatctggccggtcagtttatcaatccagccacgggaaagaaacgagtacagtgctccatttgcttcaagaccttctgcgacaagggcgcccttaagattcacttttcggccgtgcatcttcgcgagatgcacaagtgcacggtggagggctgcaatatggtgttcagttcgaggcgttcgaggaatcgccatagcgccaatccgaatcccaaactccattcgccacacatccggcgcaagatctcgccgcacgatggccgcactgcccagcagtttccggttttctcgcccggaacagccgcagcagcggccgctgtcgccggacgacttccggttgcctttcccggacttctgccaccgccgccgccgcatcatggtcaccatccgtacgtcatgttcggcggacaggcgggtctacatggcttgggcctgctttccaccggctgtcaggatcccgattctggatcggtggacaatgaacaggatgctgatcccgaagatgacaacgactttgtgtacgtggacatgcaggccaatagctctagtccggcggcctccagcgaggatcaggaggaacacgaacgggataatgagcaggatgaggagatgcactgcagcttgagcctggccagcagtagtagcattgccgccgatgaggagcgggcagctgaccagccattggatttcagccttcacaagcgtcgcaagtcggagcaggatcgggaacaggagcaggagcaggagcaggaacgggagcgggaggcggaaaaggagcaggaacaggatgtggaatccgacaaggagcacgaacccgaacaggagcatgagctggagcgtgagaagcgctcgcccagcgatgccttctccatggatcagttgctgggcaagcgtaagcgtcacgacagcaccgcctccagctccgcctgttccacggcagccgcctcctccgcctctagttcctccgccagcgctagcgccaatccaccacagacgagcatcaaaatggatctggacccggatagcgacagtgcctacatgaccagccggcggcaaatgctcccactgcccgttctggacctcgaggagcatcatcatctgcgcctgctgcagacccagatgtttgccgccgcagcggctgccgctgccaccagccaggcaccgcccaccgccttcctgccggcgggatcacccgtggatctggccaaggactcgccgcccatgtggagtctcctctccgaaatgtaccgctccatgctgctgaagacacagcaccagcaatacaaccaccatcaccagctgcagcagcaacaccagcaggagcagcatcatcatctgaccctgagccaccaccatcaggagcagcaccatcatctgggtcatcaccacatgggtcaccaccaccatcatcaccatcagcaccaccaacagcagccgcaacagcaatcgccggcggccacgaatgcgccgatttccgtctaatgtccagactgctgatccatggcgatgatttctagatgatttccttagtcaaatttgtttttatattttttttttgtgtgtgaatcgtattttaagaagaatacatttggtggcgtgctgcattacacaaaaaggtggagcttcaggtggtggggctgtgccacagcttgaccattaaatggctggcactcctcctcaggcgcgaccccgcaacacccgcaaccaatgccactaagtaccccacccccccctctgaaaactggaattgctccgaaactaagctttttctgctcgtacatgtgttatatggattttttttttttttggaaacctatgtataatgtataatgtatactgtagtgcgacatctaagtgtatagtattcaatccgttcctcagtgtgaatgtgcagatgcatgaatgagagtgtgtgtgtgtgtgtgtgtgggatcccaggatcggatccaaaaaaaaaaaaaaattaaagtctgtcatctgaaaagcgggctgggcagtgcagaagcggggattttggaacgggttccgtttccctgccccctctatcggtgtacaacgaagtattgatatttataacgaaatatatattatgaatggcatatattaaatagttttaagacaatttttttcgtagccaataaaactatattgtattgtataacttggatgtactaacacagcaagcaaattctattgaaacatatcccccccgtgtgttaaaaaaataaaaaaccagaagagattcaattcaaccaatccctaaagaaaaaaaataaacccaaaaaaaaaaaaacaaaattataaaaatccatcgcaaaggttgatagatcgtaggtgaacgaaaatgttattgctatcgcaaacgaaaattcctcccgacgattgtgtactgtattacaacaagattttaagttttttattaacaaataaacaacggcaaaattgaagaaacatgt

SEQ ID NO: 10 - protein, 568 aa, Drosophila melanogaster
MEHIMNPFMSPAYLLGHGPHSHQHVHSHLPSHPQPNAASPASSPGGSSGSGSGSAAGSGTGSGSSLKPRRWGSPPINLAGQFINPATGKKRVQCSICFKTFCDKGALKIHFSAVHLREMHKCTVEGCNMVFSSRRSRNRHSANPNPKLHSPHIRRKISPHDGRTAQQFPVFSPGTAAAAAAVAGRLPVAFPGLLPPPPPHHGHHPYVMFGGQAGLHGLGLLSTGCQDPDSGSVDNEQDADPEDDNDFVYVDMQANSSSPAASSEDQEEHERDNEQDEEMHCSLSLASSSSIAADEERAADQPLDFSLHKRRKSEQDREQEQEQEQEREREAEKEQEQDVESDKEHEPEQEHELEREKRSPSDAFSMDQLLGKRKRHDSTASSSACSTAAASSASSSSASASANPPQTSIKMDLDPDSDSAYMTSRRQMLPLPVLDLEEHHHLRLLQTQMFAAAAAAAATSQAPPTAFLPAGSPVDLAKDSPPMWSLLSEMYRSMLLKTQHQQYNHHHQLQQQHQQEQHHHLTLSHHHQEQHHHLGHHHMGHHHHHHHQHHQQQPQQQSPAATNAPISV

SEQ ID NO: 11 - DNA, 3107 bp, Drosophila melanogaster
tctgtctattttctgatatattttgataaaattgtaatacaatttttgaatagcataattgtattgttttccacctctactggtatttcctcaagtgtcatcactacctcgcggcgtttcgctgtgagcgctttttcggtatttcgccacatatacggtcacacttctgcactgtggatttttcgcaatttgactttaattttattcgatcggatcgggcaaaatgtaccgcactcagatctgcaggccctaagcagacgcctaaggttcaactctactccgttcgcagctgcatcctttcacctgcgcaggtgaaacgcaagaacggcaaccagagccctggtgaaacagagtcggcgaaggagtgttcaagaggggggaggagcagtgcggcggaaggcaaaagtcttttaaggcgaaacagcgcacaaaagccaggtaaccaaagatagaatctggaaaatcggacattttcagccggttgaaagggggaggcgtaatcccacatgtgagttggaagtcactggcagtggtgggctgtgggtggtggtggtggcgatggcgatggcctgccagcctgtgcaaacccttccttcgccgaccttgcccttctatcgatttccgaaaaattgcatcaagccagatgcacagaaaatcacagctgaaggttaaacttttgcatcggatcagggccaaaaccaaacaccaccaccgaccgatttctttattctttgttcctcacggggcgcagacgaattcaagaataaagaacagccagtcgccacatatatatgtactcatgcacatatgtataatatatatgtgcttaaaaagcgactggcatacattatttctcgtcatacatatatgtatatgctcaaaaaacgtaatggcactgggccatttacctttagttttgcaggcatggaaagtccctgtgaatccgaaagttcgctggacggtggcaccatgctgccaccaagcccagtttcccgggagcaactccagaagaggatcgaatcgctcacccagcagaacaagtaagtcagacactatttttaaaatgcatttttaccacaaataatatgactctacgcttctagggtgctgaaagccgaactggataccttcaagaccaagtgcaaagtggtgcaagaggagaatcgctgcctcaagcaagcctcagtcatcattgttagtactacttttatgttatatcaaattgaaattgagtttcacaaaagttgcctcaatttacctttgtttactttcacagcaagccaaagccgagcaggaggaagaatacatctcaaacacgctgctaaaaaagattcaggccctcaaaaaggagaaggagactctggcgcaccactacgagcgcgaggaggagtgtctgaccaacgatctctcccggaagctcgaccagctgcgtcaggagaagtgcaagctggagcagacacttgagcaggagcaggagtgcctcgtcaacaagcttatgcgcaagattgagaagctccaggcggagacggacaacaagcagaccaatctcgagcagctgcgccgcgaaatggtcgagttggagaacacgcttgagcaggaacaggaagctcttgtaaacaagctgtggaagcgcatggacaagctggagaccgagaagcgttcgctgcaaatcaagctggatcagccggtttccgatccgactacgccgcgagacatcacaaacaacgcccatgccaatggtggcgatacggccaccagtttgagtgctcatatccagattctgcgctccgaagtgcttcgctatcgctccgacctggcgagcgctcagaaggaagccactatcaaaacacagcagtatgcgcaggaagagaagtcgattcgcgaggaaaacgctcgccttcagcgcaagctaaagcaggaggtggagcgccgcgaagccctatgccggcacctctccgaatcggaatcctcgctggagatggacgaggaacgcttctacaacgagaacctgatgggaggcggttcgttcgctgtagcgacggcagcagccgccgccgcagcttcagcggtgagcgcccaacgtcaacgcaccatcagcagtcccgtctcccacagtccctcgagtagccgacctctaagtccgggcacggcggtgcaaaaccgctgctatgcctgcggccagctagtggtgagtacgatattgtgaaatgttgctttccagatttgtaaaattaaaaattcttcgtttcagaatcgtcgtgccagcgaacgcttcataaagccagcactgccaacgcccatgctgggcctgaacacttccgcaccgaacgtgctgacctcaaccaacccactgctgggcattttgggaaccggcagctcctcatcgtccgcgtccgtatcagctgggaatgccgctggcggctttctctcgaatctgggaggcgaacgcctaagccttggctcgtcaaattcggctggcggcagtgccaccttcttggccggcggtggaggtggaggtctgctggcccagctcactagccactccagcgcttcgtcgtcgtcgtccaatttgatgaacatcagcctgaacaactcgtccagcggcaatcttgttaacagcagcagcaactcctcactgtcggcgtttacgccaaccaatccgcccagctcggcggccacggcctttatccagccagccagtccaatggacacgtccacctgcaaggactaggaggatgcagtagctctcgcacagggatacagaaaaatcatgacttattcacacactttcacacgaaaacacactatattcataaacacgcacgcatgcaagcaaccagtttaacgatcctaaaaacataagaaaacacagaaacaaaagatgagaaagtaactatcgtaagcttctccagggcgactcaaagtcgccacatttatatatggttaatatgtatatgtatgttctatttgatcaaaatctcttaaaacctttcaataacggaattcctaggcgaacgaatatttagcgctaatgtttaagatttgaatgtttttctaatttcgctcggttccagttaaagttaagtaaaacacagctaataatgaga

SEQ ID NO: 12 - protein, 532 aa, Drosophila melanogaster
MESPCESESSLDGGTMLPPSPVSREQLQKRIESLTQQNKVLKAELDTFKTKCKVVQEENRCLKQASVIIQAKAEQEEEYISNTLLKKIQALKKEKETLAHHYEREEECLTNDLSRKLDQLRQEKCKLEQTLEQEQECLVNKLMRKIEKLQAETDNKQTNLEQLRREMVELENTLEQEQEALVNKLWKRMDKLETEKRSLQIKLDQPVSDPTTPRDITNNAHANGGDTATSLSAHIQILRSEVLRYRSDLASAQKEATIKTQQYAQEEKSIREENARLQRKLKQEVERREALCRHLSESESSLEMDEERFYNENLMGGGSFAVATAAAAAAASAVSAQRQRTISSPVSHSPSSSRPLSPGTAVQNRCYACGQLVNRRASERFIKPALPTPMLGLNTSAPNVLTSTNPLLGILGTGSSSSSASVSAGNAAGGFLSNLGGERLSLGSSNSAGGSATFLAGGGGGGLLAQLTSHSSASSSSSNLMNISLNNSSSGNLVNSSSNSSLSAFTPTNPPSSAATAFIQPASPMDTSTCKD

SEQ ID NO: 13 - DNA, 5393 bp, Drosophila melanogaster
gattggcaatcgcctgcggacagcgcaggacagcggtaatcgatagtcgagattgcatacctgatatcatcgtcttcgctacaatatttgcctttaccggttcagctgcagtacaaaagtcgatcaatttgagtaattattaacaatttgggtgagtgctggccactggaagatagccgcagcgggaaaaatacagaatagcaagttggtgtgcgttggattgcgctcatcggtgtaaaggcgtgcgtgtgtgcacgtccctatgtgcgcttcgcggtgtgcgtgtttgcttgtgtgcgtgtggtggcccctgtatatgtgtctctttttttctcaatttccaacagtgtgtgcttcttcttgctgctcggcacattttgtatgagcgcttgtcaattgtcacaatacgagtataaaaatttatttttatgccccccgaccacacgaatttcaacggtgcgatcaccgaaaactagtaacattgtacaagcaacgcgaattaaacggaaaaccgaaaacaaaaaccccaaaaggccaatccaaccaaaaaaaaagaggaggaaagaagaaaaaagcggaaaaagagagtgtggtttgtgcgagcaacaagaagcggaaccaaaaggaaacgtgaagaaagcagggggggtggggtagacaagaaagtgccaagattccgttccaagatattttaacaataaatttcgcacgccagcccaaattacgcaaaataatccccttaatgtatgtaatagtgcgtgagcgtttgtcccagtgtgtgtgccatgattgcctgtgtgtgtgagagtgcggtgtgcatgtgtggtatgcgtgtgcaggataatttgtcagcaaaaaaaaaacgatgaaaatatgaattagcaactccattcgcttatctttgcagcaaaatgagcagctccgaggaagtctcctgggtcacctggttctgtggacttcgtggcaatgagttcttctgcgaggtgagatatcatcatcatatcagcatcaacgacgaattacccgcgttcttcgctgtaatcgcgttatctaagcgcgcgctataagtgcaacaattgcaaagtgcagccctcaatctctgcctttgcgcgcgcgtgtgtgtgtgtgtgtgtgcgtgtgtgccgcaaggtggggcaataccgagcccaactgtacacacatgtccagataacacacgatatagtggatatatgacagtatattccagtacagatcctaattgcatacgcttttgattccaggtggatgaggactacatacaggataaattcaatttaactggtttaaatgagcaggtacccaactatcggcaagcgttggacatgatcttggacttggaaccgggtaagtttagaatgggctgttacccatatccaaaattgtaatgtatatagctaatgcgccttaccatccacagaggacgagctcgaggacaatccactgcagtccgacatgaccgagcaggccgccgagatgctctacggcctcatacacgccagatatatactaacaaatcgcggcatcgctcaaatgatcgagaaatatcaaactggcgatttcggacattgtccacgtgtctactgtgaaagtcagcccatgctgccattgggtgcgtaaccagatccttgatcaatcgctcttacctatagctaacaaacatagttgcgaatctttctgcgcgtaattgattgtaatctaaaaaaaaaaaaaaaaaacaacatatctacgaggaacctcgtgcttttctgcctagtaattacatagccagaaactatcaacgcgattattggcacaacttctaattgagtttcctgaatagcatatcattggggctttcccatgaaatcttacaccaagaaaaaaacaacgcattcttaatagaaattctaccttaattgtctggcttggcttgccctagttaaaaccttcgcaacgcttcccgatctccaataaattcttaccgaaacttccctaaacgttgttaacgatcaaataaagcaatgctgaatcaaatgcatgcacaaatgcaagatagggtttcactaaacaaggtccctcaatttctgtgaaaattaactaggccaaagtggctagacgagccttgtaaacatttctgctattaatgataaatgatcatgatggatatcatgttgagttaaatcaggttaaatatgtttgtaccagatttcaccgatgaattctgactttttctagttgctagttgctctgccagtggtctaatcctttgattattatcctcaggtctgtcggacatccccggcgaggcaatggttaagacctattgccccaagtgcattgacgtgtacacaccaaaatcgtcgcgtcaccaccataccgatggcgcctatttcggcactggatttccacacatgctcttcatggtgcatcccgaatatcgtcccaagcgtcctactaatcagtttgttccaaggtaagatttatacccattactgtatatgcacattgttaatatgctcttttgttttatgtgcccgatacgacgtcaacttgatcatcacatacataggctatatggatttaaaatacacagcttagcttatcaaattcagctgcaggcagcagccaattttaaaatgccactacgagcggtaaatttaaaacttaataactagctattagtatcctttccaccatttaccccactctctcatctttttttgttgtattttattttggaatctaaaattctatatattgactaaaaaaaacacaacgccaccaagggatcattcaactactaagcatataaatatattatatcttttttatttgttttctctccccacacatacaaaaccaccaaaccaaccaccaccaccaccacaaaaaaaaaccaaaccaaatcaaatcaaacatccataaaatccgatcgacaacctgaacctgaatatgattatgaatacaatcatgtctctgcctgtctgaataaaaccaaacataaaaccaaaatatcgatatattatcgatcgttccaatcgatcgattcttaaaattgggtgtagaaaaactaataaaataaatacaccaccaacaacaacaaatactacaacacaaacacatacgcacgaatacaacaacaaacaatccatttaactgcatgtaaacgaaacaaaaacataaattgaaatgatagtttacaacgggaagaccgatagacagcaacacacaacaacaacaacaacaacagccacactgagagacggagagacaattgtattgaggtttttaaacgctgggcgcaaagtttcatttatataaatataaaaactaaaaaaacaacacaaaaaacaaaaaccaactgcgtttgtatttcaaaatgaaaagaaacagaaacagaagaaattgtataacaaaacaaaatagttaaaaggacacacagcaacacgcatatttatttagagcccataaacattcaaaacatgagaaacttcatgcgatgttgatttttatttaaaacactgcaacttcttattaatctaaacttcattcagaaacatgtatttatgttaaatttgaatgttaccgctgagcagaatatccttcgcattgaagtttaagttcaaggactacaagcataactctcaaatacacacacacccacaaacgcctacacacacacgcttatatatatatatattattttcttcagtcaattaaccaattatgtatgtgtttttatatgttcgtttcctcacattttatgtatgtatgtatgttttgtgtaacattttaagacacaggcagtgcaacacttgaccaaaaaaagataaaaagaaggaaataaaacaaacaaaaaggatactcgaattagacagaaaaagagagtgtgtgagagagagagagagagagagttagaagtagagcgataggtaaaaagaaactaatttaaagtagagaaaacaacgatataagcaacatagtacttccaaataataaagaacacaaataacgatcagcatttatgtaaacgacaacgcaaataaaaaccctgtataaattccatagcccgaagcgccagtcaaacgcgcgaagattcccaaagtagtggccggcaagaagatccctacttaaggaaagaagttaccggaaccccaactcccaaagaagtagacgaaaattaatgaaaccaacaaaaacatacagtacagtcatccccatccaaccgaacacccactcactcacccactgatttacacacacacatcgacgcgctcacacacatagataccgcatgacccccctaataccaacacccacccatacacagaatgaatgcaaatgaacggaagcaaaagcaaccacttggaacataaggatgtggatcgaagaagaggatgaagattggcagcaggacacgagcaacgaaccgaacgaatcaagccccaaaattccaacagacacacacacaatgaaacaagtacacatacacacccacacacacactcatgagcatgcacggacaagcggaaagcaaaacaatggcagaaggatcccttttccatgatgtgcacacactgttatccaaccgatagttacggcaagtgttgccctatcgttcccagaagcaataacaaacttgtagcagtgttcaacaatcaatcaaaagcgcaataagaaaacgaatgataaataaattgatatgtgaagccagcattaaatttcgttgcggattgtttgtgttcgttcagtaaagtaaagaatacaaaaaaaaaagaaaataacgaaacgtacataatacatatatagctttggctttgttccagttgtagcggcattaatcggtatagtttagttttttaagggtccaaaattggaaacttttccatttctaattctactgaattcaaatcgccctccccttgttgttcttttctttttctaattcttaactctaaacgtattgtatgtagtgcgcaaaagcattttcacccatttgtaataatgtagagaatagaaattcttctgccaaaacgaattaattgaatttgattttttttttttttttttgttaagatcaatatgaatatttgcgtaattaggagaacgcaaaacaaaaaacacacaaacaataagtcgtgaagtgaagaacgttttttaagaaaattagaaataaagtataaataaatatatatatatatatatatatgaaaatctatatagagatcgatagaaaggccgaggaccgttgataagttaatctggcgtgtgcagaaaactgtttacaattaattgatgagaaaataaaacgaaacgagaaatgaaaataatggagaacaaaagtaataataacaataactaaaataaaaacgaaactgatatttaatacaaaa

SEQ ID NO: 14 - protein, 215 aa, Drosophila melanogaster
MSSSEEVSWVTWFCGLRGNEFFCEVDEDYIQDKFNLTGLNEQVPNYRQALDMILDLEPEDELEDNPLQSDMTEQAAEMLYGLIHARYILTNRGIAQMIEKYQTGDFGHCPRVYCESQPMLPLGLSDIPGEAMVKTYCPKCIDVYTPKSSRHHHTDGAYFGTGFPHMLFMVHPEYRPKRPTNQFVPRLYGFKIHSLAYQIQLQAAANFKMPLRAKN

SEQ ID NO: 15 - DNA, 31960 bp, Drosophila melanogaster
ccgaaatgccacagactttttgtaggcttttccactttttcgatttcgagacttcgagcgaaacggtcgtgtttttcgcgtgtgtgcgggtggcggacgcgcgtgccaatcggaaaaggcctttaaatcaaatgagtggctcgccaaaggagcgcatcaaggtgtgtgcgattgtatcgagtgtgtgtgcttgtgcggtgcggagaaagccagccagccgccagtctgggataaaaataaagattaagattgggataaaacaaacgaacggcagcgaagtgcacaaattgccgtggaatcggggctaaagaaggaaaaacaagtgtgcagcacacacggattgaaatgtttgccaatgtgtgcgagcgtcacctaaataaacaacaaaaaattcgatttgcagcaaagagagcgagcgagtgagagagcgcgagagtgggaggctgttattgttgttgctgctgttgccgccgctgcatgtggcatgcccgaaaatcccaatcacaatcagctgagccctgccgcgcctctccctacctcaccccccgcacccatacgccttctcacactgtttgttggccagtgtaaaagtttctcgttctgttttgcgtgtctcctccgtttctctttctccagggccacaacactgggctacaaactatgtgaaaacccgtttcgttacatttcgctttgccccgcctaacccccccccccccctcccatcattaattcggtttttttctctgctgtcgcgtcacgcctctcacgtcttttttttactgttttgttgcagttgttgcttttgcccagcgcctctttcattcatagaaaacggtcagcaaagcaaagcatagcgaggcgacagcaacaacaaacagcaggtagagcagaaatattagcgcgatttcttttcgtttcgcccaaaagagcagccaaaaaatcaacaaaatacgaaacacaaagccaaatcaaaagaaatcaaatttcaaattcgtgcggccaccagcaaatatcgaaataaagaaattatctaaatcatcatcagcagcagcacaaaaatcgaaaatctcctcgctgtgtgtgtgatgtaagtgcgataataatatttaacaattgtaaaagtttattttatacatcatgcctaactggcgctattgttcgcccctttttttttcgtcttccgcctttttttttatgaaatttgctactcatatcagaccaacttcgtaactacatcaagtacaatttttaaggtttataatgttaccataatttgtttaaaatttcccatgattgtcgtcatttatggggttttccttgagcgctaatcatgcggttctataccacttgaatgataagattgataacattcttggcaatcattatcgaatctatgggaaaatcataacaagttccattttattcgcaggcagagaactgaaattaatcgttttggttaattgccaatttgatgagttccattttccaatcgcgatttaattttcacattaacaacacatttgttagcccattaaaaatttgtttggcatttgttttctttaaaaacagctcattaaatcgccggagtccacataaatcttctcgtcgtttgtggctaaatattgtcacttagcaaacactcgaaaatatataacttaatttatgcgcacgactattaaaaaagaacttggaggtgtcgaaaaaagctaaatataggaggaagtgtattaggtaattgtgtattccacattgttataagcactactgtctttttattgttatctgacaattctatgcaatttattaagtacatggatcttaagttgtataaaaatagacatgagctgtacataaaaaatcaacatttcgctgcgaagtggttcgaacgggcaatttaacacgatctacttaacttgttgtgttgctgtttattaataaaatatttgccaattatacgacagtttgcgcgtttagttccatgtgtttcgccctattattaaatatttatacttgataaacacgtgcttatttacaccattagtatgattcgatcattttctgggtaatcaaacgataactgaactaaacaaatgtttttctcaataattgcgaatatttgtatagtaaaacaagcagagcagttttctgcatcacagagctcagtatctggtatctgatgtcgcatattgtagataagaaactatagtaagggacttggtaaatttaaggcgataccaacgcattgcggtgttgggattacgtagaacataggaccttggatgcgattagctcggaaagatgtctggtttttagataaatagcgagagaaacaatctaatacacaagattcaagcggaagtttataatcgttgccaagaaaattccagaaggctgatttctgcctatgcacttcaaagcttttcgataaataaacagtgtaaaatagtttttcccagattaaaaatgctttttaggatgaataagttctggtgaatttctctttgctagaaataccctcttgtgcattttaagttttttaacataaattgaaattattatttctttaatttttcctctgccccttttgacctgaaaaatccatacgtcgcttggtgacttctgaaatacaaatgacacccccagggggtcacccacctacaagtgacgtaacttcaaagctcacatatgcatttacacaaattttgtttgtcatggagacaactgaatcatcttgagcaacagcatttattacactggttgacaagaaacccgtttttaaacgtgtaaccaaatctacgctatatacacttttagtttctttatttactttaacatatataaattccaatatttaaatatttttatataaataagtaatttagtttctatcaaatttatataagaaaaggcgtgaggttttgtagtccacttgggttagcaagttcgtaagccttttcctggattccttatcggtattgaattgccgtgttgtggttaaccgcaaataagcagttttgttcatttggttttggtttacgttttacactttccaagacccagaccttagaaatcagtcagttgtaacgtacatcttatgttaagagaaaaagatatctatcatgatatctaaaaaagtttggtttaagaacaaaacttaaattaaaattttaggattttttttttcgttccttaactgaactttctctgtcacgcattgaagttcaaagttattcaaaacttccactaattggcattaatatcttttgctttcctattttactacattttgttaatgtgctcatcatgcgctgtgttgtgttgccagtttctcttgtttaggccaaatatgaaatggggcagtcagctttgtcatgacaactgtagggcaacaaaatgtttatccaacttcctttaacaattgggcacgcaaaaccgtcagttccgtcagtcatggccaggggtatgccgtcgggcaggggaagggcggtgaatagggattgggttcggaattgggattggaagcgggagctggacaggtgcgccccgtgtgcggtgttctgacacctttctccacggccaggggccatgtcatcgtcagcatgacaagcgctgggttgcccggtcggttgcttaatggttgattgaattgaaacgagggaaactgggttgtttaaagggctgtagttgagcttgtgggtcctaacccctagatgagggttcaacgaaagtcagtttactggggaaaagcgttaaaacggaggttaggcaactctggttccttgctttttatgttgcgcttataaacgaactttgggataatattaaccagatatatttgtttatataaacaacttgtgaatagatccattagtttgatcttttagtgcatttcattttagcaggctaatgcaatttcttacacctagttaacaaatttgttttggtctaacgccaaatgtgttctgaaatgagttttactaaaaagatgcattacttttttgcttttatggatatttaactttcaagggtatctaaatttattcattttcttaaaaattgcagatgcatctagagttgctgacaaataaggatactagatgacacaattagaatggcataatttcattaggacgaattgcctgaattcaagcgcctggcaatatttatgcagtactttcctcacaagcgtcgcttttcatgcacgagcagcaaaagtttagttgtaattattatgcaaatgtatacagttcaagcgacgagagaaaatgtttgtcggctaaaaaagtgaagaacttgaaggcgacgtcaaaggcatttgcacaaatcattggttggctctgccagtgttgcctaattgttatgcaaaagggttgctcactaaagacagactgttgctattgttgtttattgctttattattgtttgttttgactgggattcttctaaactcgattgagcctttaaaacagtccatagttcacttcaaaacataatacataacagcatagatatcaaattgaaatgcaagcttagtattggattttaatatttatatgccaacaatggtaagcgactaagaggtggcacttcagtggggaaaagaacgaaatttaattaaaattcgtttgcctttacccccatcacttatgctcttcgtctttgcagcttgtgtgtagtttttggcaggctgccaagtggaaaagccgcctgtgttgtcagtttccttatacgtggagaaaaattgtggcaaatttcggtatttcaagccgcagatgttaaacattttcttaaaaacttacagttactagagtagattcgtgttggcccaggaaagttctttctcgatattgtcaaatgctcaaaaggtgtttaatggatcgtttttctaagtgcaggcggttgagacgacttagagataagactaggaggatggaccatgggtgatggagtgtggcagccactcaaacttgacatagacttgggccacgggcttttgttcgtgaatgtgcttctgaggttgtgtgtgcctgagtgtacaaggacgtgagcactatgtgaccactgtggcacccaggccatggacgggaagtccttagtggaaaccaatttcatcacttattgtccccagctaagctggcaaagaatccgactcgtgagcgcccggcaccacctttgatgggatttgaacactgtgccttaactcggcttggattcctgttaagtgaattagtgaaaaacacattttagttttgaactgcattcttcttgggttcttgattacttaaaagcttttcctcacgcacagactggcacaggcaaagaacaagggcgcttgtggcttttaaatcaatagtgtggcagagtggtaaaggaggctgaatggataggcatagaatggaccttcggctggcgatctgttcatttgattgaactgagtggtcggaaacctattcaatttaataagcgccattgaaaattgaatgagcggtaaggacataacgattagtatggcaaaatgttcggaacgctataaacggatttgcaacaatgcagactgaaccactgtgtaatttattaaaagtaaaattcttttataattacctttttcttaacgcgtttgaaatggctggtttgcttttcgtttgcagagggagtttacaaagtatgttggggtttttaaataattgcgtactcaacgtgcacgaaatattttcctttgtttcattgccttttcagttgtctctctttttttgcctgtgaaaaatatggcaacgtacttaagtttcttgatgcgcatacaaaaactgacaaattgccttcatgaactacccacccactttatttttgcctttgagtactcattaaaaccgggtaagaataaatctttacaaatttcaacgttcgctgcgggaagtctgtttaaaaatgggacaatgtgcatattctctaagtaatttagtgagccaaaatcacattttccttgttaccaaaacatacgggttcgaaaaaagataccagaatagagtttgtgtaaaactctggcgaaaaactgattatttgttggtgcatttttactgtcagtcatttaaagattcatattttcccctactagttttagtggtacttgtttaattattttcttttggtcacttgctgttgtagtggcctttttaatgtgtttccctgagagctttattttaactggttagcatgggagaactgcgagctggttaaaaggataagcgttgcatgaaatatgaaaatgtccttgaccaaaatgctgcctgttttgaaaatcctaattaaacaagcttatttgtacaaaaataattcactattcttgtgataagatttaactatcatttccactttaacttaaataaatggtaaactgctcattcaaaatgcttatcgaatgccttttaaatagtagtttatcataagcttgctgagtttacccctcgatagctacactcctttattggcccactgaagcatccatccagccggtaaatcaatatgccacctcgagaggagtcatccataacgacctgcttgccaaatattcgtgcgcagttaagaggcgaaaaaatcatgacagcagctgggtgtcgacaatggatccttgtgcaggcaccaggatcgcggccccaaaggcgggtaatgtcattaacaacaaattgagcacattaataaatatgaattatgattgttaataaaaaacgtatggccaaaagcgacggaagtggaagtgtggcgtagtttcggcgaatttgcacgcccagtggcaggaagctgacacctatccagtgccacgcccacttagaaggggcgcaataaacggagttgcgggtaaaccaaatggtaattcaccctgtgggccacaagctgatgttgcataactttcagcgctccatggaatgcgagtgtgtggcagacatcataaatcaattttggtcacgggaagaggcagccgagtttccgtagttgaataaaaatagtctattttatttcggccagattcaatggggagtcaaagctccaaatggtcagcatatagatagaaggaatgaaaagccactgccagttcatcgaaaattcccatcgaaacaagtttaagtatcgactggaaagtttatttagtcgtaacctattccctacttttaagtacactaagctagctgctgtcaaacgtggccatacttttaccttaaaatgcactttaaaagccatttacaacctaaatcctcgtaaaccgcgcccgagcccgcaaacgattcatcataatggtggccacagccattttagccaagttacagctcatccgcagaacggttgccattttgttctttattattcaagatacgggtcggaggcgcttaactggggccacaaattgggtactacctagatatttgttggcattaaaaatgcctttggtatattcgattttatattgaactcaagtgcgctttcagtgtgttttattgataacgtcagcttgtcacgtttttttttcttcgtcccgctcgacgcgaaaagtgacagccgtgaattaggaaaacgaaaagttttccctcaaaaaatgtgttcctgtgtatttgtaatgctatctgtgtaatttggacccaacatttgcccaaacataaggggcgtcctgtttttgcttctttcacgactgacacttgtattcgaactttttccgtacacgagttttcggtttgttatttacagcatgccacatcactttcgtcatgatgataatgatgattcctttatctttgcagcaccttgcacattcatcgcatttccttttgccagtgaagtttcttggctctaatgtaatgtgaaatgctacaattaagtgctagacgagattatctactaggttgcgtgtcaaagaccatcttttgtcatcacagcctcctccattttgaaacgtaactgaaacttcacacacaatggacttgaaaattagatgatgccttgcaagattgattgcgatagtgcttaattaaacaaaacctgcccagttcaccgtgtaatgtgatttggttaattggaaaatatttggtcttaaccatcatgattaggcggccattgagaaagtttcacaatccacttggtttcggtgtgaaaccgtagcttgactaacaaataacaaaaataacttcatttaaaaatcgtttatttccgtaatcgaaagcttacaaaaagggcaatcatctctttagggcgaatattcgtttttaaaatgctcgaaattaacaggcagatgtgtcatatggaaagagaaatatatgcaaatcgaatcagaatcttaaatgtttgtggggttttttgtgtttttttttattttttattatttgccttgggctgtgcatgcgtttgtcatatgtatttttaaggccccactgcttttggccatctttaaggttggctggttgttgttgtttttttttttgactgattgccgccttgggcacgagtgcgtgtgtaatacttatcagtccattcaatttacatacaaagtgctaagtataattgaaattcgcagtaatttcctactgagctccgtaaactgtcagtgaattatttactttcatttcatgagttttttatattgcaaggaaatatttgtaaaattcatgcactgtaattttctttctcaggatgactaatctatattcttcttcacttttcaacgcctttgtttaatgatttgataagcactattataattaaatttctagctatgtaggtaacgcctttttaatctaatcttttggcctacgacaaccttcaaatcacttgatatcaattctattaaatttccaggcacccgccctaatgagcgataaaatgggtcttttaaactttttatactctattcaatcattaatttgtttgtatttataagcaaacccctttgttattaaatgcaataatccgtttatactctatgcagcctataaaagaaccaataaataattttgcaaaacagtttacgcggatttttttttaaagtgcaattaattctgaagagctcttgactggctttaggaattaaaagcaatttgctgttagaagtttaatgcactctttaattggtcttttatcgtgccacttaaaaatcgtctgtttttggtacaatgtcaaagcacgattctgatttgttcgaattccaagatagcttatctaacaaattggtagccaaattcaattgctgcagaaaccaaatgtacgacatggtttgttttacaagtgattggaaaatgccgtcttatcaacgaaagggtaaccaactcagttactaataactcttgttgtatacacgcatgtataccagcaaaaaatatcgttttcaattagctatagaatgttcaacccattttcaggatagttatcttttattgaagaccaattatttggcagagtgttggctgttgggaactcaaccctttgccaaaatgaagctgattatgtctgcagactgcgctgctggaaattcaattaattttgaatgcaattttaagtgcacttgtgtaaagcattctacttagcagacgctttaccttctgcctgcaactaaattcactcggacattttcgttttaagttttgctaggggttgtggtactttttcggtgttttctgttaaaaaaagagtttatgaaatacgctaatttaaattagcttccgaccagagactcagtttcaccacccagagctattcgacaaatccaatttcgcttttatttctctaccccgcccatcagatcgggtaaacaattttgttttgggtctggttggcggtatctttatgtgagtccctagtttatatatttatatagtatatatattgcctgtcgtcccaatgtattccattagccaagcgaatgcttccccggggaaacgcacagtttatttgctttgttaattaaaattacgagcgtcagacaaatttgtctgcaatgtacatgcaatgggatcattagaggtggtttgatttgttggtctatggttcatttgcagctaatttaattaacagtttgagcagcactttggggctatgctactcttttagtatatttttttaagagcattgtccaatttgatcggaatcgccgagaaagccttttttatgccacggtgtgccaggcacacttgcttaatcttcggctattcaagtacaaacctgggccgtttggtttttattattggttcaaaccatgcaaggacctattcatagtcctcaccacagatgcagcggaaaatacagagttcccaaaagtgtgtaaaatgccgcggaaatcgacttgcctgcagttgttgcttttcctggctccaaataccaaaccatttctgaacacacttactaaaatgtaaatattaacaaaatcgggtttgcttgtgcatttgtagttctgttccagcttttaattaagatagcagtaaaaacgaaaatattaatcatattccagttccgaatattgattggttatttttgtaatcttcatttgcagtagcatagctggatttcttttccaattctagggcatctctctttctctctctctgagtttccactttgctatccttcggttttcccttgccaaacctaataaattttgcattgtgcgcggcgtttggttgagcgtcgcagttacctgaattcagatattgccttccggacatacaagttggcagaagctgaggctgtggtcctttttgcccaacccgctattcgaatccttaatattcccttgttggctgaccctgcgaaagtgccatatggcatgctaaatattttaaaacacgaagtgcatgctgtgcagcttgttttgtgttttaaagtgatatcataagccaactacatgatgtttggattttggaaagtgtgagcgactgttaaaatttgtagctaggtactgaaacttggtcctttgtcctttaagatgtttggaaagagttatgtgcacatttgtgcggccctccttcacaaattttccgagttactggctgtaagttatttgcaacagttaacatgcaatataactgtggaaattgtaaagaaaatattacttttgcttatgtctacccagaatttagaattcgagtgagttttgggaagacaattttatagcctaatctaaaagtcccaacatcatttgatttctattaatattgtagtgtatttccctaacttcagtattataagagcacttttaaagtttccactccaaggaactttagaaaaatcttattattcaactacagtgctcttgacctatggcttccactcggcctcggtgcatctaactcctccatgtctcaagacaaaacagataaatgactttatttgttgagtttgctctggctgcaacatccccaaccgtaatcctatcaccactcgagaagtcaagtggcgaggaccaactgctgagctgggatgagcccttctatggattcaatgggtgagcaaggaggttcagtcaagcggcttttaagaaaaccatcttacatcataaaagtataaaattgctgcacaatgtgtgaccacgaattacttatttcaaataacatgaaacggaacaaatttgcatttgtttttttaagctatcatctttgcaaaaatgggtgaaaagcatttgcaaacttacaacctaaacctcttaggtacaaaaaagcgttgaattgctttgttttcctttcagccagctccggctactcctctcaagaagtccgaagtacacacctgctaacacgggcaacaatcttggggcagggagtcctggctgcactgcatccccagggcaccgtttattcagcagacgatgacggggaaaatgtgctgtgcagaaaggcagtttgctttactctacagcgtctttgtgttccttggcgcatcaatttttaaacagaccaaatgcagctgaattgcattttaaagcagaccttaacggttcgtctgcaatgcgtagaaattggccggaggcctattttagatacattgtgtagctaacccaaaatccattgtttgcattgcattctagcttgctttaggctaaaatacgaaattgaaaatctatttaaaaactagttacctaacttaaatgtgagtttaagattgcacaacatatgaaatacatagaatatgaccaattgactaattacatctattacatatgactaatttttcatattctctgtcttttcagtaactagcaaaataaattaggtaagtgtttgccattttctcttactcaacttgaagttcagttttctgccacaatcgcttaggttttgaattggctaaaatgaatctactgtaaacatctgtttcaagtaaaaaactaatattttactgagattagggtctgttttgagatgtaggttgatggtaaggggggcctaatttatgttgaacagaagtacgtgccaaatttcaaaaaactaaagtcgaaaactttttacgccgacaccagagaaacaaaaaggtctatgctaatttcgctggttcgggcaaggtaataccaatatttggattatccggcagtaaacataaagacttccaatttagttagctgtgtcctcgttaatcaccgccgtctgtttgttgtcatgctttattttgttgagcccggcttgtcgttttcattaaccttaattagcgtgtgccgttgacattcgtcactatccacataaatgcaattgccttactacacccgtcactattccccgccgcacagccatgattatcagcagcaacatcatcgccaaatgagagtgatattttgtgtcacacgttttccacgtcgctcctccgcattatatgtatgtatgtgcttgccagcttttctggactggcccgaagacctcttcgttggcgtctgatattgaccatggctggcatttgtggccaaccacccatctccgccagccagccagttgctcattgcaactgacttggatgactgccatcgccgtttgtgtcagctgcaaatgagtttctgggccataaacgtgaagtggaatagtggcaatgtggatgcctgggccaccgagttttgaatggtctaggttcagaggtcttgaatatttaggatatcattttagtatagtgtagtatagtaatcttagaaactatacgtttatactatacgtttcatatgccaattagagtgttaaataatataccaaccagcactaattacgacgcccatgccttaagtcgttttcctccccaacttggcttataagcccccagttgcgatgtcgcttttgctccatttacttgccaatgacagtgagttcgaaaagtatgtcgacctatcgcttacttcattcactgcccccacatggggaactagtttttttgtattggaatcgcattgcacgcggccggatcgtgtgactttgaactcaataagtgtggattggtccggtcgatttttatgacaagtagcgaaaccgaacaatattaaactggattaaaaaatgaaccaaaatgagcccgccagttgtaaaaactttcacgtacttcatttgccagatgaaaaaaaaaaaaaacaagctatttgtgcctttttccatctgactgtttgtcacgtttgaagtttgtttggcgttttgttcgcagtttttgcttcctacacacgggttttcttgggatcttgagatctttgggtcgcggtctgggtttttttttatgatggttcttcgaatgcctggcagcttgaggactgcttgtcaataaagttcttgacaccttttcttcatttgcacagatttctctcgcaatgactttcggtttgctttcgaatgtattgttttatactcattcgcacacattccatgtaaattcaattgcttttttcgcttagcaaaataaagatactcgaacggaagctaatgaatataagataagcacgaatacattaaaagtttatggtagagagttcgttaaacttgccaacagctctttatgacctagataattgagctttaaaacaacaaatgaatagttggaaatgggatgctaaaaaatcctgaactataaagtagtaattgtaccaaaaaaaaaagtaattgttctgctctggattttcatctatttactttgcttgcctacaaatgctttatcattcataatttgtatactgccgaatgagaatggcataacgaaaacaatagctaacccactaaatcgcaataaatggcatttgcattcaatttgttgcatcaaatgcttaatgaccgagtgaacaaaggcggcagcgacctttggcaaatacacgcacaaagatatgaatatttctccttcccgaatttaattgtccaaacaaaagctacccatctccacctccaaactcagtgccccggactactactggtcacctgcctgacctcggagttaagtttgtgtgtggcttaattgcttgtgacttgttgttgcttccttgtcttggcttgttgaactctcaaggtaacaagaagtagcaagctggccccttccgcggctgctatttaatttccacgaaatgaagagggaagaagcggcaaataaaatgtctaagattgcgattatctttttaataacatctcgaggaaggcgaacattaccacaaaaaaaggcgggaaactggcaatgaaaagaaactacaaaaatcacgaatttaattaccacgcaccccagatagcgcctcaaatgaagcaataaaatcccagttgcctgggagtattggacattgcaaaagtatctaagtagaaacattgaccgaatagtaaatacaatatattcagtttttcctacatgatttgtttagtttttttccgcatgcctgcatctcaaaaagcatagctgacacaggtctttcatatcaaaagcgcccccttaatcgtttcagagttttgctctaaatgttttcagggtccccccaaaaaatatgtggcagttatttattttaaatctcattcgtttgtaaacgccgcttcacaagaaagccaacagactgctaagaatagccaacaaatatctacataaaatcaaatttatctcattttacacaacccttgccaggccaacaaatgaataaaatgtcattgctgaaattctgtgagtggcattcatgcgcaaaaatcatttcaagtaaattataacttttcctcttcactggttctaaaacacagacattgttatttatgcgatttccttgtaaaaataaacattcattacaagtggtcaatttgacttggttatttgaagtatcgaaatattttgttcgaagttcaataccaaatgcgccaagtaactataaagcaatatactttaatgaataatcaggtggataaactgaaagcactgagtaattgaactataatatagatatttaaggccaaattgaaaagctcttcctgagagttgccccgatttcatcagccctccgccgtatgaacgtgaggcactggctcctgaccctgctgctgatgcagttgttgcggaggattgttctgaatactggggtgctgatggactgtcggctcctgctccttatcttccatttccatctgctcctgtggctcgagcggcgtctgcggctgctgggtttcctcggaggactcggcattagggggatccggatcaccatcactgctgaccagcgagtagttcgggggcttcttaagcaggtagcgtgtgttcgggttctgtctcgtttcgagctccaggcgatcgatcagccagccctgtttctggttgtttgaggcccagaaatagacggtccccctgtccttgggaccctggacatggaactgcagctgggccttgtcctcgtcacagcgattcttctcgttggacagattaaagcccgactccttgatgggctcgcccagcagaccgaccgctccactgtgctggcgtagctgctggatggccaactgatagaactccgtctggcgtacacggtcctcaagtcgccagcgcatgtaggccaggcccgagatggaggcgagtgctccgcagatgcatatgctgcccatcgttcgcttcgagggcagaccgatacgcaactttaaggttggcatggcggcctcttagtcggcaagaaatcacttttagaattttgtgtgtgtgtgtgtggaggtgtcagaggcctacaaatacttgaaatgcgaaacaactcgatgacaatgatctcaaagatttcgaactcgtagcgccgttcccacaagcaccgatgtatcactagatggcacttaccaccgagccttgaaatcactgccgctgcctgggatcggcgggcgttgcctccgcataattgcgctgcaacttcctccttggcctggccaacttaatgctgcctgctggcgagcagagagaaccggcggcctggctcaatttcatagtcaccacccaaaaggcggggaccgcaaaacgacgtagaagaatccacagatagaacacagaactcgttttgtttctctggctagctgtacatactagtttttttttttggtttgtaggccaaatgagcggcgccattaatgacagcccgaaaagtgagccgtccagtggagatggttcactaccttgcatccttgtggcccttgatcgtgggagggtatccaacaagtagaataacgaacccgagagcacgcgaattcttcagactgggagttctctgaattttacataataacttataaagcgagatgtttttttaatatttggttctgataggtatttcatagtcagctcaaccgcgtccatcgatatttttttgtttatctcattacagcagttatatttttactggtcagggccagtggagtcgcgaatagaagcagacgagagaccaatgagtatccaattagggagcacatagttatttaaaaatagttttccaagaacgcagggtatgcgatgagaaatgcccccatagcgcgtcggtaatcgatactcttgcaacgcctgtcacggatgggaacggaatattgcatctgatactggccagagtgcggttaatctatcaatgcatcttcaagtttgaatttctgctgcggcgagcctgatgttacatttctggcctaagtggcctctggtgtggcggtcctccttatcgagggggggggggggggttggaggatcatgagttactcagttagttactctgtctgtctgcgtgcccgtccttctgccccccactccgctggccgggaaatgtgacaatttctgtgttcgttttttagcctcattaagacctctctaaacactgccacttaaagaccattttggtgtgcttatctttatggccaagacatctagtgcctgccccctccaccatccaccgagacatgtatgtatcttcgacggcaagtacgcctcatacatatgcttaacatgactttgatgtactcagcgtggtggtcagagtaagatctttaataaatcaaattgccttggtattcgggaagggggtatggggtacttaaagcttaatctctctgcttaagtatttcccagaaagtaattctatgagttttatagtcgttcgggaagccacgggttttgcaggtgttcatcgtacgtatactgaaatctgggtattaactctttagcgcgattggccataaaagctaagttgaatgcaaaaattggttaataagtgagtcatttccgatcaaaaattacaaccaattgtaatgtacaggaggaacttgttatcagaaattacaaacagtttcgaatgattatctttacatagtaagctttttcaagccgttttagcagtgagtaattttagcatttgatgatttcatattctttacaacataagttacaagttaagctgtaaagattaattaatcccccgtatcaaatttaacattttctctggtagacactgacgcacaatccgagaaaaggcaatttatcaactttttaatgacatatgtgctttttgttaagtttttataagcaagcgtcaaggctttttaattagttttatgctgaaaacgagtaaatgatgctcagcataaattaattgtgagtagggtcggatccgagttgaatcataaaactggttgcttgtcttcccaaagatgaaatatgcaattgagcacaacagtgccgcaaataagtaattgccgactagtctgcctacgatgttcttcgttgttgattatgtattttgtttatttaaatgatttagtcaatcctagtcgctgcccatcgattcctataccttcattagctcaaatggccttcaaggctcaccggcaaaattatccatttgcttaaaatcttaaaagaccataaattatgaaagactactgaagatgccaagcagaagaggacagcgcagttgttcgttcaatcaggcacttcttcagtcagccatttgagcgttcactcactcagctattattttcaataaaaacaaaataaatatggcaaattgttgggaccagcccgcctcggcagccagcggcaaaaagtaaaaatcaaactacaagtccaagcaaaactacagaaaacgctgtgcgcctgcgcagcacgcaacgccaaaagaaaagccgctggccaagtcaaaggcagaggcaaaggcaaaagctgcttctcggatgcggcttagttggagccaaagtcgtagccaaagccaaagccaaggtttctgcctttgtaattgcttgtctccgctcggcttcaagtacgggcagcagaaaaaaaaaaacaaatatccagcgacatgcgtctgagtaatgttagcgccataaataggcaagacagacagaaagagacgagttcgccataatggagtgcctcgactaccacatacctgttactcaactaagagaagtgcgagatttatgttggattcatgggcgcagcatacttgtcaaagcgtccagcataccctttgctcgtagggtaaccaacatgctgatcgaacctcgacggtcaaaccttggtcccaacttgtgtgtttaattgccagttgtaaaaatcttttagggtggagctaatcaccaagctacaaatgcaaaaataaaacttccctataagtgagttgaaggccaactcggctttattcttaactgaaagttcagtaagattaaattccttatcctttaatttgttcaataaattaaacatcttaaatgcaagccgaatggtaattctttgcccatttttaagccctacttaaattttttatcttgctgtggaagcttggccactccctttttttaagcaaatggaagccgcattgattagagcagcacatggcacacatatgtttggacatgccaccatgtggaccatggaactggatacagcaaaatcagacctcgaactactcttccgcctgaactatgggatattatcttatatgcctgctgctggttatatgccgctgtttcggttgctgatacttttgctgctgtgtaggagctcggtttccatctgggaaatgggtgaacaatggtcactgataaagtccagcgaaagagagctatttcgaagcactcgtctgtaaagtaaagtagccgacacaaaacaccagcgaagctagcagctcgatgtgggatctgtgcctggggatttctttcttttatcatcggctgtcaggcaatcgaaactacattcaagaattttctattaagaaaatgtaaccataacatttcctgcaaagggagcggtcggcttttgttttgttgtgcaacttatggcaacaagttaattgtttcttttatgttcgtgtaattgccggcgaaagccagcgctcactttacacttttttctacttcaagaacaaactagaatagctcttttagttttgcaatataatatatcaaacgagcttcaaggggtcccaagaaaaaatttttttttttaagtgctataaataaaatgggtgtagggtcttttaatctctctatatacatttcgctacccatttcttgccttctttcagcaatttgaacttatacattttggatagataacatttcaatttaaaaacacactacactggcaaaataaataaggcaaatagctctttgttcggcttggtcttttctgaaagtgcactgcggtggaggtaggagtgggaagtcttggcacagcctcctcgagctctccaagatgcagtcgcggattagatgacagattagttaaatgcgcatgaaatgaggatccgttcgcgccgttgcctgctggtcggtagaatcccagaacccgtggctgccttcagaacgcttcctacttggccttatgaccatgcggtgcctccttcgcccccggcacacgttcctctaatgtcttcattcgttaatcaggcgtcgggccaagcacgcgtaaatcgcctctattaacaggcgttgtaattgccggttgcatgcaggtgattagctgaagtccgctccatagcggaattagcaccgaaagatgcgtagttgagatacttttcgattcccacaggaactcttacatttattagtcgccggcgcatttaatttaaacgcgtctgcttgtgacatcactgccattaatgagctcatgatgtaacgcacttaagggtcgtaaaagttgaacattataactaagcccacaggctttttttattcctctagggctcgaataaacaataatttaaatttagctaatgaacctaatgacctcaggctgcccttgaacgagttgaccgtaatttatataagtggaacagccatataccgccgcacaatcaggcaatcattcccacaaaataatttcctaatcgacttccttctggtggtagttcatatttttaaccgcaagtatccgagaaaccattggtagtccgctgaaatagccaccatttttacagcccacgtggctatgcgattgtatttccaattgcattttagcagatccgatttgaggcaatcagcgatttatgccccattacgtctcgtttactaataacccataaatgtgcattctatcacatttgccagcatttcacactaagatctattgctataaactatgcgagtgggttctcatatttgtttggtttccacttcattgagttttcctttgctatcggttggccatcctgtctaatgtgctttgttggctaaaatcgcttctgataggattaataacacaccattcgcataacaaagcatcggtattgcacatcaacaaagcttgtaagaaaataagaggaaacaataaataatgctgagtcgactggaacgaatatttagatacactgaattgcttggtgaaggattgctgattacaatgaatattaattgttctgttaaatatttagctaaaagttacaaaggttgtgaatgggtttacataaatcctatacattttttgtaaacacgaactgaaagtatcattcactttaaaactttggcttttaaacgaggtacttatattttaattttaaagcagtactatgtattttaagatcgatttaaagcctcaacaaaaatcgctgttgcaataaccatcctcaaatgctcctgcctgtagctgttttgttgtaatgacaagggtacaaaagaacctgccacacccgaaaacttttccctcgctccttgcaactcgatgtggaagaaatgtgcgcaaaaaccaacaagtgatattaaatgttgctgtaaaaggggggaagctgctcagccctctcaatatattaataccggctacttgtagattaaaggggtatacaagactacttcacaaatatgcaaatgtgcttcacaaatatgcagtagtattacaatctttttaaggactaacaatattcatctacaatccaaacattttttaaaaatttggtgtccaattaaggtatactcctctagtggaactgttgctcaaagtgcgagcaatgagtatctgatagtcgagccactagtctcatatcttgctcgttcgcatttttcgtgcggttcagcgagaagaagaagacggctggcatacggaaaagctgtatacgtatacggcgaaaatgttgaacgcaattgtgctcgcactgctgtcacttttccatttggttgccgtccgcataaataaataaaagtctgcgagtgtgtccgcatcctggttgccggcttttagcgccgttgtagcttgttgccagctttaaggcgctttagggtccttacactttccgcgactcacgatgattcacctcaccattcacgtcctgcgttcgttgtcatcatgactttgttctgcaaacgcactcaccttctactcgtaccgtattcatggcgcgtgtgatgaaaattcgttttcactccttgcgacggctgggcgaagtaatgaacccgtgctcacgtaaaacgctttcagttcgctagaagaatattctgttttttcttctgctccacaaagtacctgctaattagctctcaccgagtggtaatcatgtaagtcaacaattgaacgagaaatttcattagggcagccaacaataacagcgcgagtatctcaagtacctggtccgctgtttggctcctaactctccgacctcacgattgcgtcactttccgcacaccgcgtcctctctgaccaatccattagtcggggaaaatcacataatgcatgtaaacgataatgaaaatgacattagtccaggccgcacgagaagcggcaaagccaacaacagcagattgaacatcaaattcagatgttttcgcattcccaaggggaggcaacaaaatatttgcacagagatgaacttgtgaatgccctttgaaatacttttttttaaaaattaagcaattagcaacattttaactttgccaaaccgaatgcaatatgcccttagatgcacattgtagcataataatgtaatcacaatcaaatgagttaaccaattgagaacagggtcttgcttaatctgcaataccctgtagaaatgcacaacccagcgaacgggaaagcgaaattaatgaaattaagctaacaaactgggaccaaacctctgagtgtgtgtgtgtgtgggaaaatgtatctatgtggattggtttacgtggttcgcccacgcgtatagcattaagttttccagctcctttttttgtcgaagctacaatcttcgcccctcctcgtccccgccccacggaagtgataatcgattcgcacctgtcctgatgtgggcgtgtgctctcctgttgccaacttttcccttaccgccaactgtcgctcattatacgaattaatgtcatgcattcgcgttcgatattttccatcttatatttagcatttgtccaggggaaaacaaaaccgttgacatcagccagtggacattgggtgcaattgactacgacataatggcatgcaatgacatattattggcagttaagagactgttgacctttagctctgctgcaatcaataatccccgggacggaattcgtgttaaacaataaatatttacctaataatatctttgtgatcagcaagtcagtcgatatagaggataatgtcccaaaaatgtatctgaaattcttactttatatggatattattccctttagccatattcccttatcttcacggatttcaacacaatttcctttgcattttcttctctctgttaacatttgtactatagaaactttgtttgctcgtttgctacttacttactatctgggtgttgcggcaatttattgggtttttgcttcataacttcagtttttgtacattttgatcgcgtgatagttggcgtcgctaaataggcaaaaactggctggcgatatacataaacccgtacaaggttctgtctcgaccgaaatcggtggtccgtggcagcacctaccctctaattcgtggcttgtttgtttgcctttcgctttcgccgcgtctttccttggacgctctcttttggccaaaagcttcattagtgccaatgcacccatcatcgcagtatttgtcgctgccagttggcagcaaaaagggagctccgaattgtgttacgcgtccatgaggtcaaaaccaatcgattttctcgactttttcggtcgccttttttttatatgtgatactcctgttttgttctttgcatttgagaattttgttttctatggcacacgctgcgtatgagcaatgtatttggataggtttgaacttataacttccacgaaactttatacacagcaaagatatcaagtgaattttttgaatgggctaaacaaggtaatattaaactaactacgggtgaaacaatctattccatataaaaataaaaaagatggcttgatttgatatttccgtgacggttgtaattattgttgagtatggacacaataatttgttgtattcctttgtgtgagtaacattgcacggctatgacaaataattgtagcattaggtgaaacgacattatttttagtgaattagtggggtcccgccaaccaataggctaagtaatgtgaatccaatatcgatcggtgcgaaagtgtttttacgacatgcatctagactttatgtctaattttctcaaattagttatatgaaatcatccctggctatcacataaaccaattttatagttgttagacctgaagtataatgtgactaatcaagattcaagaaaacgttagttttttatatgtattttttatattcgagatctctttatttctagccatcgattggcaatgctaatgaagttagtacgcaagtgccattggttggcttgggatctcctagaattttacgaggtggcgtaaatcttcttccgcatggaaccattggaatcgcccgacgaactgcgtggccacaccctcagcgaaatggttataactcaattctgtcgtttccgatgtcaaaacaaatgaactaatataaattgaagactttatgagtgtttctatgagcgcgtcctgtcccaagccatagtgttcctttctttccgagtataaatatgccaatggcaaacatggtgcgacaggtatttgggcattcatcaacttgtgtatgacagcatgttgttggaactgctcgtaccataggttccactccctctctggtgtagagaattcgatattgaccatcaggccatcattaagtggccataaaactctttgttaatttattaatgcgtaattatcgataattacagccatatctattgactatgggttggcagttttttgtttgtgttgcctgcccggcaattatgtcatgcattgtgttgaatttcctggcaaattgctaatttaattaaactttattgaacactatcactattgattttcagccaagcaggcgaagcgaacatgaactgattaataaataaattcgccactatttttacttatctaatagtttgaactgtgcggaaaatgaaccatagatttctacccccgatcaagtgggtttcttcgatcagctctacgatcctccccccattgacccccgcgcccaatcactttataagctagctatccaaaaataatcagcataggcagaaacacagaggcgaagcaaacaatgttttcataaacgattttcgcctgtgaccgcgtcgcagaaatttctgagagaggcgcaaaaggcgaaaacgagaaataatgaggcattccattcggcagagcctcccaaccatctggaaatgcccaacaaggggccagcgcaatctaattagacataataaggcaggcaggcaggcagttggagggggaggggaggcaccatcgggttgagggcaccactggtcatataccaaagagtttgtcagctcgcagcggatcgactgttgccaggcgaaggttagtttcgctatagccaaccagccacctccatccactccagccgctccgacaactcttggaactgaccaaacgacccagccggcgaggccccaaacagcctcacgagaattggcgatcgcagtgcggagtttttccggccatgctctgtgctattaaaatatattacagcagcaatttcagtcgactttatttttgcgctcagttgcggctgtggatgtccgcagtccgcagtctgtggtccgtagtccgcgaaccgctgttcgccgcttataacttcattttttatggtcatgaaagtcaattgcagtttggcatttcttcgatggattttccctcgttcgcccgtggaaatgccagcatcatcgcttggctgcgacttgggatctgtattgcggagaagaagtcgtaacttggcgtagaaaactattattcactttgcaatggaaaacataaacctattttaattgcactgcccactaggcaaatgtgtaaattttttttggcaatatatattttctaacctttgtacctatcttaaagaattttggttcttgatgttcatcttgagataaccggtttaatcaatatgagaagtttattaaccttcagtcttatcgatgactaatgaagtatgcaaatctatatattataacaaaccaaggatacaaaaaatggagatttttctatacagaacagattgagcacaacatacccttgaactctagggtgcttttttttttttgtagcaacccacattcattgttgcaaaacaaacgtgtgtcgcacttcacgttgccgtttttgggggcacaacttcagttggcaaattgaaaactcataataattctcacgtttcgctccaaattttttaagtcatacaactttggggttttgcataatcaccatatatcacaacgagtcacacacgccgcagccaaaacaaagtgacgaagaacagccgcaaagtgtgtgtacgtgtgaaaaggaacctgaaaaatcatataaacatataaatagtttgggtatcgaatgattataatgccaaatgtgatcgttagggtggcaactaaagctccagacgtgttgccaagccgacttcctctggttctgggattaagtttctctcttcaatcaaacttttatcggaactcaaattgtttgtgtacttggctcggtttcctgtgaagtgaagtgcggattgaccgactcctactatgcaaattcatcatccgacaatgccccagaaacacacaaaaccggtggcactttaagtgccctccaggaggcccacgcgtccgcctaccaaccaaattaacgatggagcaatgaactcaaaacacgacggtccatacggtctaatagttttgaatttcggaactcgtgtggacctctgatggacccccaaggcaagtccgctaatgaatgtttttgtcttctccagaagccgcgattgatttgtattcatctggccaacacaccttgccaattgttgtttttttttttttggcaaagaaaatatactttgtgcctggaaaataatatttttatatgcgatattcaggtgtaaggtcaggtgtttcttatggcagttcgcacagaacaaagggcagtagatgagcaaggtttcaatagtgtgctctaggcaatcccatacaaaccagttgtttttctaagcatttactgggtacttttttgcttataaagaattatccagcctaaaaaaacttagcgagtttggataagaactatctgaactcgaagcggaagttaagggcacgcttaaatgacgtaaaatgtttaacaattgaatgcagcttttatattgtatattgtattttaaatatgtatactatttagccaaagtcgttgcacccgtgaatgaatatttaatttcggtggcatccctcagatttattgtgaatcacaaagttgccgtgcgcacattttgtatgcacaagacctgaactgctttcaaagtggcattgagatctttaaacaagtcgacacccgcatcttggagcagagaagagtgcttggcaaacggagacccacgtaagcacttcctgtgcgacattttgtttggttaaccacgctgaatgataagcaatcattcagttaattgataacgagctcaaacaatacgctagctgaaaagggaagcatgtacgatacgtgggttggagaaaactgtgccaattagacaggaatgcagcagtttcatttcaagagtctgcggcttcagtctatttgctaccaaatggagcccaataaaaggcaagcaaaactacatatattcagtttcaaccgaatgtttttaatatttatcaattaccggtctaagaaatagcagcagttgacttatcacattttctaatagaaatattttgaaattccgtataaaagcttacatttgaaaatgtacaaggaaattaaaaagcaattctactgctttttattatttaattaaaaataaattcgagtgaacattaacaattgatttaaagagtgtacaaatttttaatgcaataacctacctatttcaagtgaacaaaaaacatataaaaagtaaaacaacttatgagttaagtttatagatttctttctgtgctggtatcattatttaattaagattgacattttaaagctgttgagatttccaagagtaatacgcgttaaaatatgacgtcttctctatcaaacttaatcttgtgattactcgtttattgtgtattttataattaaaatgctatcaatgaagacgtctgatcaataaaaaaaaaaacatgttacactcaattgttaaacacagcctgcaattttcaattaaaactacacgcttcggataagcgttgcttatataagaaataaacttttatattttttacttttctaagtacacaataaatctgtgcgagtttattcataaaaaatataaatagtttaatttaaattctgttatcacggctcaattttctagcataaggccagcaatgactttcaaacttatgaattctcaaacctttgaataacgccatctaccgtaaagggtgtttcttttaaatctgtgagagggcgctgctgtagaactacatgttttctacatggatatctacatgctagcatggacatgattttagtttcgcgcatctgttgtttttcaaatcatgttttacaaatgaacatatattttaatgttaatttttttttgcagctacaacatgcgttttgagcctctgggccagaaaatgttcacccgccgcaattggttgttgcgctgcagcatccttatcaatgtggcggtgatcctgtacattggcagtcaattgatgatcggcggcggcaacaacttctcgaacggcggtggcttcctgctgcaggagcagcaacaggtgtcaatgatgcaagtgggctccgcctcatcagcggcccaggtgcagcagcaacagcagcccactcccaagaaccagaacgtaagatacatctagataatgctcaagcgaactttggaactaacgcctcgtttcctctttagcaggtggccgagatcttcgagtccgaggaaaagcagctggtcaatgccaacgcagatcctccagcagcagcggctcaggtggctgatggcggtgctggagccccgcagttggcgaacgatagtggtgccggggcggctgctctgggcgatccctcccaggtgataggaaacattgggcccggcggtgtcgccgaggtgaacaatagccagtctgacggcggctacatagtcacaggcgatgagaaggagctggaggagcgtgtgcgatcgttgatcaactgcttcgaccacgactaccaccaacagaccttgcagcgtggcgacttctgggtgctgcagaactacgtgcgggcggagcatggcgacatcaagtgccatgagtcgatcacctacaccacgcacgcggactacacgttcctggacaacctggtgccgctgttggagcgctggaacgccccggtgagcattgccatgcacgcgcccggcacggacttccagcccactctggactcgatccggtatctgcgagagtgtctgcccggcagtcacctggtgcgcgcctataccaccttccacatctacttcggaaccaagcacattcctaagtctgtgcccaagcctcacgaagtcttcaagacgggatacaactgcacacttccacctccgtacttcaacgtcagctccgggcacctgtacaaggcgcaaaagaagttgctgtatccggtgaacgttggtcgtaacattgcccgcgactcggcactcacccactttattctggcttcagacatcgagctgtatccgaacccgggtctggtcaagaagtttctcgagatgattgctcgcaacgaacagtacttgagacgcaaggcacccaggtgagttgccttcagttccttgacagaaagaccttgtgattgagatctaacatctattgcacattacagagtatttccattggccatcttcgaggtggaagagaactccccagtgccacacgacaagacagagctacaggagttccttcgcacgggcaaagccataccattccacaaacgagtgtgcgccagctgccacggggtgcccaagtccaaggagtggatgtccgccaacgagacagatgaactaagtgtgtttcacataggtaatgaattataattatatctttgttgcatttagattaatttcttatgttgccattgcaggaaaacgaacgggttactatgtgcactgggagcccatatatattggaactcatgccgatccccattacgatgaacggctcagctgggagggtaaaagcgacaagatgcctcaggtgagtcattccgcattattgcaaagcagcagtaaacttaataatattatttattcacagggctatgcgctttgcgtaatggactacgagttccacatattggacaacgcattcctggtgcacaagccgggcatcaaggtgctgaaaaaggacaaccgacgagcgatgttgtccggcaagacaaaccagctgatacggaagatcatctatccagaactcaaaataatgtatggcatgcgcaagggatgtgcgatatagtaactaatactgaagccaagctgaggtcagtcccgattgaacgggaaggaggaaaaggcgaaaagactacaaccaacttcactattactatttgcaatgctatagatcggttgtgttgactaccggttcccattccctctatagcattgaatgcgcacttcaagtgcgtgttttacaattagctagagacttagccctagaactatagagcattatgtagttaggcttagctataggtcaggacgtgtaacgccatgggggcctattgggttttaccgcgttctgggttatctttttctactctgcaaagccttgagagcatggcttacatagacttaacgtagttaaatgtggcttttaggtatcatggtgtattccatttagctggccattcttaagttggaactagacgtcaagtaagcagtcggcccttttgatagagcgtgcttaagaatacacgcccaaaattgattcacttccaagaaatttctgtaaataataacacactaggacctttcatttcttctgttctctggacataagcggccagagacctgggttatgcggtgtccaccactcataggcagtcattatcagttacttttagtctaggccataaacttaagttgaacgttatttagttgaattttccatatacattcattaacgagttaaaaatagtttttattggatattcttttcaaaatactcaaaaagagaaattgagagcaacattattttcgtataccggggcgagtttcctagacatcagcaaaacaaacagtcttaccacttttttgtgttttatatatttccgcattaaaggcatagattaaacaatgttttttgggcaatgtagacttactgcaaagaccaaaatttagattagaccgataccgggccaaaacaattccaacgttaaatatttgacttgattagcagagtaggaatcattgaattgaaacgtattaaatagactttgagagttaaagcgtaatagtaataatgataaagacaagtttcaaacaaaaaaaaacacaattactattaaaatttatacaagaaacacac

SEQ ID NO: 16 - protein, 544 aa, Drosophila melanogaster
MRFEPLGQKMFTRRNWLLRCSILINVAVILYIGSQLMIGGGNNFSNGGGFLLQEQQQVSMMQVGSASSAAQVQQQQQPTPKNQNQVAEIFESEEKQLVNANADPPAAAAQVADGGAGAPQLANDSGAGAAALGDPSQVIGNIGPGGVAEVNNSQSDGGYIVTGDEKELEERVRSLINCFDHDYHQQTLQRGDFWVLQNYVRAEHGDIKCHESITYTTHADYTFLDNLVPLLERWNAPVSIAMHAPGTDFQPTLDSIRYLRECLPGSHLVRAYTTFHIYFGTKHIPKSVPKPHEVFKTGYNCTLPPPYFNVSSGHLYKAQKKLLYPVNVGRNIARDSALTHFILASDIELYPNPGLVKKFLEMIARNEQYLRRKAPRVFPLAIFEVEENSPVPHDKTELQEFLRTGKAIPFHKRVCASCHGVPKSKEWMSANETDELSVFHIGKRTGYYVHWEPIYIGTHADPHYDERLSWEGKSDKMPQGYALCVMDYEFHILDNAFLVHKPGIKVLKKDNRRAMLSGKTNQLIRKIIYPELKIMYGMRKGCAI

SEQ ID NO: 17 - DNA, 835 bp, Drosophila melanogaster
atcagtcgaaagaaaaacactgacgggtaaacaacacgtatcatgtcgagctctggaattgtactctatgggacagatctcagtccctgtgtgaggaccgtcaaacttaccctaaaggtcctgaatctggactacgagtacaaggaggtgaatcttcaggcgggcgagcacctgagcgaggaatatgtgaagaagaatccccaacacacggtaccgatgctcgatgataatggcactttcatctgggactcccatgccattgccgcctacttggtggacaagtatgccaagtcggatgagctgtatcccaaggatctggccaagcgtgcgatcgtcaatcagcgtctcttcttcgatgccagtgtaatctatgccagtatagccaatgtcagccgcccgttttggataaacggtgttaccgaagtgccccaggaaaaactggacgccgtacaccagggtctgaagctgctggagacgttcctgggcaacagcccctacctggccggcgattcgctaaccctagccgatctgtccaccggacccactgtaagcgccgtgcccgctgccgtggacatagatcctgctacatatcccaaggtcaccgcctggttggatcgcctcaataagctgccctactacaaggagatcaacgaagctccggcccagagctacgtcgccttcctgcgcagcaagtggaccaagctgggcgacaagtgaaactaaacttatatttaaatatgacatttcacaagtttgaattccatcaattaacaacatacacatccatttctaaaacgtaaacttcttcaataaaatataacatatatataaaata

SEQ ID NO: 18 - protein, 224 aa, Drosophila melanogaster
MSSSGIVLYGTDLSPCVRTVKLTLKVLNLDYEYKEVNLQAGEHLSEEYVKKNPQHTVPMLDDNGTFIWDSHAIAAYLVDKYAKSDELYPKDLAKRAIVNQRLFFDASVIYASIANVSRPFWINGVTEVPQEKLDAVHQGLKLLETFLGNSPYLAGDSLTLADLSTGPTVSAVPAAVDIDPATYPKVTAWLDRLNKLPYYKEINEAPAQSYVAFLRSKWTKLGDK

SEQ ID NO: 19 - DNA, 30232 bp, Drosophila melanogaster
tgtaatttttgcctgacacggaatcggaatacagaggcttctgcttgcgatatatttcaccgttcgcacttgtttacgtttgccattaaaatttttcaaaaaatctaacgagtaacagcggttgaatcgccggtggcaaaaatatagaaccgtgtgccgttgtgcgttggtggatcgctggaaaatgtgcgtttaaaagtcgaaaaagtaattgcaccgaagagaaaagcccgaaaaacaaaaaagcgtgctcgcaaattaactccagcttcgcgccgccccccgccccccgcccctacacctgtgcacttatcacctctcgctctctcttcaattgtgcaagtgtatgtaaaaatgtgagagcagagagcaaaaaaaaccacactacgtgcgcgtaataaaaaacgaagtgggctgtaggcgggaggcggtgtaggtggcctgcctcccaatccctcccccgaaaatacaaaatacatacatacagaaatctacctatccgctgcttttgttgttgtgttgttgttacttgaaggtttttttcggtgggggacaatcaataaacacgagagctgcgtgtgaaaaagagacagcgagtgcggagtgcaggtggagaaaggggatctcaaattggagcgcgaagagattgagagagagtggggagcgagagaggggcttgcgcatatgattcaaatgccggttttgagcgctctatttttcgagtcttaaacaagtgcagtgatcaattaactaaatacttgccctaatcagtagttttttttttgccagatatcatatcttgtttggatttaacaatagttaaagaatagttcaaaaaagtgcaagtgcaagtgcaactgctacctgcgttatcgacgcctatcgatattcggaaattgggtcacgggcgccagcttttcaggatgccaatcagaattagcccctacattattacaaacccaaaaaagtcaagcaaaataaagtcaatttacgtaggagttgcaagaaagtagagaataaacaacaatacaaatgcctaattatacacaaaaaccaacatgtttatttaggccaacttgaacaaattatttcgcaaaaaaaaaaacaaaagttcctccatcgtttagcaggttttgatcaaatttgagcaataagcaaaataatcacgtcaattttgttcgctaatttgtgtttcctattaggttttgcaaagtgacaaccagaattcacttcatattttatttataaccgaacaaatgaattgtgctggctcgctgtagcaattcaaaaataaacaacaattgcagttaagcacacaagaaaacaaaaatgtctgttcaagcgaaaaacaatttcgggcacccaattaattaagcagttacattggcgaacaacaaaaatgtttttcttcaaagcttaaacgaaatttttgcaaaacctggttaaatattggtttacgtgacttttggcatgttattatttcatgccttttgggaattaaatattaggcataaaacaaataaagtgaaaccagaccaaaactaattacatacatgtacaaaaattcaccgtattgaaaattgataagattgaaaattagtttaatggctggagctcgtctaattgatgtttcaaaagtgtacctcacgacaactaaaaaatcgctcaaatctcagtaaatacgaatccagcaatcaaaatctattaaccgaaatactttcaaaacatcaaacaacagcgaaagcggcaataaacaccaacatcaacgatccaaaaataaatgtagaaaaacaaggaaagtccatgagagtaacaaattaaatttggttttagccaaaacaacaaaagcaagctaaggaacaaggcaaaaaaagtcagcgaagaaagagacggaggagcaggtgaaacaggtggacgcaggagacccacccacccgaaagaaactatcaccaccagcaggtgacagcaaagcagcagaaagtcaggtgagtatcgcgccgcattcgcattggaatccattccattccattccattcctttccattccgctgccatttgtgtttgctccccgtgcgattaaatatttcacgcgcttatcaattgctcaagggttggcattgcttgataaacaaacaactaaacaactaaagagcaaacagaaattaaaaagccagcaaaagtcgcctgcttgggcaggtgggtcgccaggtgaggttatactacagctagtgtggcggggatcgaagtgctcagaaagccactgagatattctggaatgagccccaccatatatgtacccatacctctactcgaatattgttgaaatgagtacgcgggccataaatcagtgaatacccccggataacttttatagaattcgcttctataagtttgaaaattaaagaaaagcattcaagtacaactagtatgactagttggcacacttcacttcataatttaggaaaattatgagttttgctgctcagtcaggcacccgttgtttctacaaatgtatatatacttcacctttataaagcaataattactttcataaaaacttaataaaagggttggacaagctttataaaaacaaaaataaacatataaatggtactgtaaaaagtactaggcgtggactaaatcgtaaaatcattttgctcaaataacttaaaattctttgtctagatttaaatgtaacccagatttctttgaaaataacaacaggaactattaaacaactggaaggtgcctttctatgcagtgccatctatttttaagacttttaaactgcttgaattcaaaattccccagttacacccttttttatgtaatccgactacatttcccgttcttaatatcctcttttcccctgttgcaaaacggaatccagataataaattctcgagctccttctcgatgagctgtatttgcaattaattcctccattttgtaaacttggcatcttcgccaaacggacaaaggagaataagagcccagcaacacagttggccaacaaccaacaggcgagagacaaacatccatcagcagctcaaagaagctgggttcggaaaatcgaatttttaaaatttgaaagctaaaatcgtttgcccgtttttgcccaccaattagttttttttgcctacgttttgaaatattatattttgaaatataaattttcgaaaatttttggaaatcaaaaaattgactttttaacgtttgcacaccatttaaaatttgtttttttttttcgtttgcccaataaataatttcgtttgcctatcctttaaaattagtttttttttttgcccactcttataaaacaaaaatgtcgaattttttggaacttctttgaaatttcatatctcaaaaactggacgtggcaaaaaaaccaattggtggggttttccagctttcgaatttcaaaaatgtgatttttccaaacccagcttctttgagcttccatcagcggcaaagcacacaatttccaagccaaattcaatttcgagttaagagggcgagattgtggcccgaatctgtgcgcaccacatatacacacacagatacatacacacataaagaaagccgtggcaggacgacttcaatgcgtattcgattcaatggcccggggccaccacccttgaatggcccttattccgccaccatggcctcgggcccactagcacccactcccactcccactcactccctttactttcctttgccttcctttctgctcattgtcgtaggacggcgggagattcctgtcatgtcctcacgtttcctggacccatggagcttatacttcagctgggcttagtttcagctgggattcctcgtttattgattgattcgattccccgcattcgtgtccagtcataatggatacccctgcacgggctggaatagaaagtcatcaataatatttgctcaacacggggaaatgttctaaaaatacaactaaaaactaaattctagtggagccagccctcccccccaacgaaaaggaactaatgaaaaagttgccagtcggattaaaggcatttttattgacagcagtcctttggcttccatttatgtttcatattttttaggcggcctgtaactggaattgacaagggtgaatacagcggcacgtgaaaaactcatcacaaaaacgaaaggacaatgaaggcaagaagctctctttattgtcctcgttttttgtttttattcccggcgatatatgtacatctttcattccattctcttttatgccaaacaattggctgggaaaattgtttttcaattctgattcgcaattaatttcgcaatccagaaatagaacgcatcgcataaacaaaggcaacgcggcgtatgcgcaatatttgctgaatattcaatttccacctggtggtcgaaaaacatggaaatcagctttggtgcgccgtcaaacttaagttgatattattaattagtcgcaaaagttttttgtattctgatttgcggtgataatgcctcaaaactttgacggatattaataaattatgtgtaaatatgaaaagtgagtcacacactcttggaaaaaattattgcgcataatttgcgtcttcttcaaaaagtggccaagaaaatttcttggtgctgcctgaataaataatcataattcaagcaaaaaaaaaacgaaataaaaagaaatattcacacagcgaaaatttaattgtttggccaaaaggaaaaaagaaacgaacggaacgaaacggtacggaccgaaaacggccaataaaagccacgaccttcggacaacaaaaagcgaacagaaattgaatcaaaccgcccaacactgccctctttctttatgtgcgtatatatagagtgtgctaaggggatccagattgctattcagattcgggaggcttttcaataattcccttttttatgtccaacaagcaattttgctccaccaattagggcacgaaaatcgatacgagacagccgcagaaactaggcacattatcaagtggtaattaggttcttttttttatttcaaagtaatggttttttaatgatatttaaaatagatattaggtacttcgcctttgaatacgctgattcgtggcaaaggatgccgtgtccatgtcattctttaataaatatctgaattatgttcttatttcttgtcctttatattccaagttagcaagctaaaactccaaacgtatttgtttgtcaacttctggcacttttgtgtgccaaatgggatttacttgtcgtgttttcgggacgcctccgacattacagcttcactttcttagctcatttgattacacaaacttgggaagttttccctagttttctttttgccgccgtctaagaccttttcgaactaattaggagggcaaccgcattttgctctgatggcagggccaaagttttcactggcttgtcttgactggatgccagtcatttggcctccacgctcccggggaaacttatcttgattaggttttatattttttgcccagactacacacatatatatatatatatgtatgtattgaataaacgataaacttgctgagccgcgagataagcggacgcggcacgtgagcccaaaactattattagttgacagagttccaaatcgataagtatacgccaccgcaagaacattaactggcgatctatgagctcattgatcccatccgatccgatgcgaaccgattggtttcacggatgcggtttcagtttagttttcccaggttgtcaatatgccacagatgtcacttctttttggccagccgatgacaggtcccgtgaaatgtgtcatcgtggaaaaagcgaagctaaaagctggccccattttcatttcattttatttgtgcccgccgcggtttattagtcgtaaatttggacttgcttctgtgcgaaactcataaatatcattgtctctgtgtggattttaatatgcacgccgtttgtctgcagctcagcaaaaaatgccgaatgctccaatgaaaaatccaaatgcccacgcataggatactcaagtgtgtatgcacataaagatatacatacatataagacaagtatatgtcagcagttttctggtgctccagattgactgacccactgagttttcgtctcgagtctgtctcaatctgaaatcccaggcgactgataacttatctaccgccgactgacgcatttgcgtggacttacttatatctaaagtctttgcttatcgcaaagatatcttttatgtgcatgctaagtagctttgatttgatgacgccttttgccgtcaaccgatttagtggcctcttcactttaatgcttgatttaacaatatttaaatgtatttatgcatttttcttactgcttgttcaagtttaatgatttttttatccaacctttttttcacttcatctacttgagtttctctgactcagctgagtgaaatatttggtaaattatttaaaaacctccttgttaagctataaatacaatatattgtatttaatttaaaatatctatttagcttatctacaaggtcaaagcttatcattttatcgtgtgtgtgtgtgtgtgctggcgaaatgagtctgatttgatgacgccttttgacacctgcggttgcgagtcctcactaattagaaaaacttttctagtacagtggtaacttttaacttttgttgattgcaaaactttgcttttcatagtgtcctggtgagggggtgctgaatggggggggggcggtattgaggggacaggtggtcggaaatgattgactgactgatgggcagcggcattatctggctgctgttgttagtctctttcactttcagaccgctccactcacgcactttatctcacaaaactttgactttaatcgatttaacaatttttcccttaacccctgttggcccccaataaaccagcacctaccccccttacacaagctcccctctgcccgaaggccagctgacgagcttgttgtgttgcccacaggcaaacatcaaaagtcaagcagctgcgtgacgtcaattggagccacgaagcgaaggccaccggagtggtgggtggggggcggttagttgccccacccccctccccccttctgaccatgtcttatggagagtgtggtcaaaagaacgacccacacataccgcacacaccaaacagagccggcattacttctatttgcccacgtacagtgtgttgtaatcttggagcgattgacgaagtacctagctacataaatatgtatgtatgtgtatattcgatatgactacatgtggctgttcgagaaattggataattgttttagattcgactgctcaagcgaaaggtagtcattttctgctcacgcttgccgagcaaggtaaacaattttggcagaaatgggtgacattattgttgaccagtttggagatatatgggtacacttgaagccaagaaaacctaactatgaactatgtttatatctagtaactaagaaaatcgttcgcatagttagcaattggtattagaaatatgttttgcgccagcatgaatgatataaaatgtcactgctactcttacatcgaaataaaacgggtgtactttaaaaactaaaaactaatgagtgagcattcttgggtccctgttaattaactttcccagatcccagcttgattagagggtccgaggaatggctttaaagtacgccccgtgcttatgttcaaaggagcgctcaatccagctgggcaaacagaaaacccgccttggcattcggtgtatttatgaaatacttgggtgaactcttctcggtagcttcctttgaacgactgcccacacatggcccatggactttgggggcatcctaattgataatttaagggctatctgtctaggcccacaccccagaagcccggggacttgagcttgttgtaaattgggatgagaagtcgtcggcttaatttatttctctttgaattcggccgccgggccccaaagacattgcaggcaatttaattatggaatatttattcaagtgagatgtgaaatctgttttattatttaatcctctgagcacttttgtcctgtggaaagacaaactgggctggaatgaagtttgcagcttggcaatattttgttttatatcaaatatatatataatatttgttttctttattttggggcgtaggttcgttttcctcattgtttgttgtctcaaagattatttacttatgctctgaacccattgtcctcgtccatgtttctcgactatctcttgttcggcgaattgagttttttatttgcactttgtcccttttttcttcttcagaaaaggtcctggacctttgatttattgtcaggcggcttaaaatgttgaaacatgtttttaaaagcacgctctcaagttcatcgaatattttgactcggcaacttcctactttggcagccaaccttttttcgctgtctaccttatgtttttccctacccccaagtcttttggaacaacattattttttagccaaaaagtttggccaaattctgccacgtgtaatggccataaagcagcggccttgcaggtagaaaataaaacacaactgagttgagtaaatttaatttttcatgccaagcttcgggggctggaaagtgaaaatacatatttgccaggatgggatgggatatagcataggacttgggggcatgaaaatcccagctacatgttgcgcttttgtggcccgactctttatgcgatataaatgtgtgtatatgactatgattgtggtgcacatatgcaagcttcacagtgccacgcccacagaaaaatatatatccaaactcacagaacatatgcaagccataaataaacataagttgtcgctggtgctcccgtttcgctgctctttttctttatgggcgccaagtaagagtttttcttttccccatttattcatacatatgtacattttgtatatatatatatatgtatatattcatattcttatgtatttgcatatataatttccattgttgctgcggtcgaaaaggggagtgcgaaaaagataaagttttgtgtgggtcggaaaaatcgtaagagggcagtcaattgtgttttatttttttttttttcagaccctcgacagcttttgaatttaaatattttggctctgtttggcttcgtttgtaatttttatcgcattttaatgagctcgccagcttattatttcgttgatttatttcctgcctgtattgcattttattgattatttattgaagcgatattaaacagttttaatagctgcattctatgtaatgcttcttttgaaataaacgaaataattagttattttgttggtaaatattggcaattcttcgatatttatacggtgttgcgtattttgttttactttagttataaaattgaatgaattgaattgaattgaatttaattaacttttaactttcgattaatattttttttgaataaatcacttgatttgttagcacattaactccaatcgtttagctggtgtaattatttaagtaccaacgcttcgtttagcattcatttagatatcaattaaaatattttccctgccaatttttcggacatttatcacagcggtgaaattaccatttggttttgccactcacattttttttgttggaccgatacgctgctgcctaattatgcaattaatttgcggcctttgtcaatggcttgtgtctctaatcactgtcgcatttgtttggggcgcacatattttcgagttaagtgctcgagtaccccaatccgtagatttctggtgctcggcgtggaatggctagaatttctgagcgatttgaatattttaaatatgcattcagtcactcggcagacgagtgtcgactaaatggccttagttttatttatcgcaccacaaatgtcactcgagcgtttcaaatgcccgtcatatacggcatacttactgtttttattttttcaactttccaaccattatttggacgttttttttttgtgccgtgacaggtgttacacgtcatcggcttatgaatcggcacggcttttattttttacgtttttgcaacgcccgtactgtccgattgttttgtttttttacattttctacattggctttctcagcgaaacgggctggctaattctgagtgccaatttagtatggcccaaagcaggacagacactcggtgtcgccgccagttgcgattgcagtactacaacagccttgttcgccttgtcaacctcacttcctgccacttggaagtataggttgggttccgtaagttggacactgttggctggcataataaagcaaatgtcattcttcgaacctcagacacaaggcgtagagttctaaaagttttaactactctattttttttaatgtaatataaattttcaaatccgaatttaaatttacttttactttattttactttgtaactttctgttttatttctctgtgcttaaaatgtctgcatttgaaatttatttcggctttcaattgttttagtttcgaaaaatagtttttggcacattatttcttgaaaatgtagtttacttaaaaaaatcagtttaatcgagttgacctgtaattgtatgcacatgacgtcaccgtctccttgttggctaagtgatttccaatgcagtcggctatgcaggccaagtgacgttggtttggccagggggaggggattcggatctagatctggatctgatttgcataaatgtcgggcggggacggtggataataaagtggcgagtggctagagttgcgaccatgggggagcctcatgcatgcatatcgtcaaaatggcacagaccgaaacacaaaatttgcgttcgcttagcacatttcgcacattaacccacatgcaaaaaaaatgggggacggccaaggaaagccttgttttgtctattgtttacgttctttttgccattttcaaggcagaaacctttctcaaccagctttttgcataattatccagaaggtggaaacgaaaacacccagcaaggcgacctggttacagaaagcacacattcaagtgcttatatttagatatttcagctacgaataattacagtccgcttgcaaagctttcagtttatttaactcgtctccttgtttgaggcctaattaattgagttggcttaattgcattgcgtaggtgggcctacacaaagtatatacccatgtgtacataggtacatgtatctatctgcgctgtatgtatatcctatttcagtttgccatgcatacttgcaatctctgatgccacaatgtatgctgcagtaattgccgaattgcaagcaaatttgcaaatgccaaatgcggcttttgtatctcgagttgtagaacaatggtcatgttgtctgtaatcggaagttggcaaaggatccatttgcgtggctccattaatttactgggaaatgcaaagacaggtcctacaatcttacaacttgttaagtaaactcatatttgtatttaatattaaagtgcttagggttaaggaaatgtagaacatttacggtgtcaactcattttctcacactcatgcagtgcttttcgtcactatgtggaatgatttactgagcaatacaaacttgttaaggttatttttatttcgaaagtgaaaagatataataaaaacatgacctgtatgagtgatgagttcacaaacgtcaaaaaatacgaggagtaatgtaacttaaatcaatctgattagtttaaacaacggctaaccactttctatcagctatatccaacttaaggacttaagagtgctgtaacgggtaattaaattctataaataaggcggtaagctttaaaaataataatattaatccttggacaccccctagaaaatagtcgttatcaacgttttcaactcttactgagttgttaattgcgttttggaacacttttaattatcggcgaactcgcactccggggcaaacagccgaccagataatatccacaaattggcctcttttgcgctgtttgctcgactgtgtagtgtttggtagtagtaatccgcgttttgggccttttagtttatcgtcttgaattgggcaatggcaatcaatgcggcaagcgaactggaacgaaaaacactcagccactcggcttttgttgctatttgctgtgtgtttctgcttttatctatactgccatgttgttaattgccgaaaaacttggggcgcaagttttgcttttcttcacgttttgttattcgcttttcagtatttccattttttttttgttttcacccaatgtttttttttttgccttttgccgggcttgtttgctttgagcacgcgccgttaaaaactgacacgcgcaacaaatttttggtagatggttcgaggaaaaggaagaatcgtgtttaaaattaaactgggaaaacgacaggcgaatggaatctaggaacgtttttatggggcaagagcgttggcggcaacaaatgtagataaacgttttgttacaacacataatcgcttttcctagggtggctctcccagatacagatacaagcacatccgtttactgtactcacaccgaagggtggatggcacagtgaacactccatatggcacaattatccactagtctgtgacatttttggtcaactttagttttgatttgtgtgtaattgtgaaacaacgttttcagagaaaaaagagtacaacagcgcaagatattaaatcgcatccttagtgctcactgtactcactggaaggtaatcgcgttttatgtatacgcgggggtagaagctgttgcttttgttgctgccacctttaaaagtatctgaatctccatctatagacgagtatctgtatctgctgcccgccctagcgagcaggcaacataattgctcactaattcaacgctaatggacatcaatttaagcatccatccagcagtttatcattctggccataatcgccggatggcaggaaggatcggtgggatgcctcgctccgcagtagctgccttaaaattgtgcgtagatagcattgggaattttaactatttatagccaacagatgggatgtccttaatggaaagtgagacacctgacgggtccttgacaaattcatagaatttccttggaagtccaagcaaggcatcttgttaatcaatagaagagaaattagagtctgggttaaacaggaaaactttaagatactctctgttagataaataattgtaacacaatgaacatagcatttaaaataagttatcttcttttctatgttgaggaaaattatttgagtgtataaccaaatccttagatatcgccagacatattttagaatattgttaagcgatttgtgcatcttgcagggcgtcttcaaatccaatagattaaaaagtaattgaattgactccagaccgtagcgaaaagctaagggcggagaacaattgagaccgggtatctggccagggaaaagcccagagatggcaaaggttaactgacaagtcgttgtctcagtgccacccatagcccctctcattccggttgaaaattgaatgcgaaaagcgacttgcacacatacatacatatatgggcatgcttcgatataaaatcgtgtgtatgccctggtgaattttctttttcgcttcgcgtgggctgtaaaattccttttgacagcttcaagcgttccattcgcgttgtataaaatccatatgtacatgcactgggaaaaatatcaaaacaaatgtgtagaaaacgacgaataatagaaagcattatttttcttgccaatttccattgataagccataataattttttcttccaaccagcggaataaagggtatctgatagtcatagatatggctaactatagcgttgtctcttgcgcaaattgcattttctctctgttaacatgtacacataattcctgtaacaaagggcatttgcaatgtgtgagtcagcaaaccgcatccgcttcccggcccctcctgctcttccaccaattttccccgcttttcccatccgtttagtgagcccctctcattacgcatacgacatgtgttcttctgggcgttaataaatcaatacccaggcgtcgtattttgacaaacattttcaagctgatgacctttttactttaacgtcagagaaagagacggcaccttctacttccaaacccttgggtgtgtgccatagagggagagaggtggaagagcagcggcagttgcagaaacaaataagaaattcgccattaaagttgcgtgacgaagtgaaatttgcgtcaaatactcgcgggactccttcttcttcttcctgtccaggataaacatacatatatactctacaaacatacatacatactcgtatacgtggagtccccacacacatggagcaaacgatccaaaagtctgaacctctcgtcctgtggcgcattttgagctcaagtgccggcggcgccctgaagtatgccctaaaattgctttgatgtgaatgcgatacgttgtgttgtcaaaatactaacatataaataacgtatatattccaagagggggtgtgggggtgggtctggtctggttgtagccaagcccacccgcctgtggccccaaatgtcaacgggaattaagtgcttgccgccttatttttccgcatctgccgggctgccactttgacgcattgaccggaagaggaaaccttttcaccaagcttgaagatggcggaaaatttgaatcgagattcgaaagataaacatcgctttcagggccacaggaaaatcttcaagcatcggaggtaaacaggtaacattggggaaatgctttcagcaggaaagtgtttctcatttaattggtgcttctggtgtaaaattaaacgttgttgcaaacttttgctcaaacttttcaaaataatgtttgtaaaattttgaagtagcgatgcagggaagggccaactctaaaatagaataatattacagaggaaatctgttcgggaataaagtttgtgaagtgaaacaaaggtacgcaacatcgtgcgtgaaatctaatgaaatgcaaattgaaaaattaacttcaagcttaataaaaacgccattgttccaaaatattcaatcggaatgcaatttgtaacgattatcaaaaaattagtttcaatttagtttactattgtcataaaaccaaacctacatatgaatgattccagcaataaaatatgcatttctaaaaagagcatagcaaaagtaaatgaaaattgctaccaaaaatcgattaaaattcaatttcggactttgtccgagtatttctcccattcctttcaagtttttaccattttgaatatcaatttcattagtttcctaattgcatgctattcagagtcatgaaaaaataagtgaggatatgtctggttgcttttttttggcagactccctgcatatgaaacaataggcaatgacactgcacttgagctgcagcctcgctggaaaatctttttcttggaggaccaaattgtctcctgccgttgtgccattaaaacacttaacccaattcgaattcaatagagtgggcggaggtcaagtagggttgggttgggtctgggctcgaatctgggtgaaacactgtcaatgacacagacagacctcgatatgtggtcatgggacatgcataataattagaccgcctcgagggcttctttgtttgaggtcttccaactgttgaatacacgaactgaccatcaaattcgagatgtgtccatgtcgtttggctaattaggcacacaacacacacacattgctggttactgccgttccttaatgaagtcatttggagcagaccttgtgatggccgccgtcgctcttgaatccccaaaaaaaaagcgaaaacccaaaacccacgcacaggtgtcccatttctgaaatgttgacgtaattggataggccaactgacacagaattccgacgaaggatcctgaaaacaggtcggttgggcaacaaaaacaaacgccatatggattttgtgtcatctggcctttcgggaacaggaaatcctcaaggttgtttgcaggtttgcagacctaccatgtggttcatcatcgctgttttgaaatttgatatcgaagggctttatcatgtcaaaagaaagttaaccaattactaaaaataattgatatttgtatatcaatagcatacttgaaataaactagttttaaagctgttgttagttttatccacttaataagatgcttcaagtttttcagcaaatgttcatggcattcagcgatgtatcccttgaataattcaaaccattcattatgaatggagagcataaaaccgattccaaatgtaaatgcaattttaaagttggattcaatttcgttgccagcacaaaactcaatttcgcaattttgtaaaagcgcaaacatgcgaggatgatggggcaaaaggtcgggcatcccgaggatgtccaccacccactgtgggtggccaacgtcgacggtgggtgggtgcggttaggtgctttcacctttcaccaccacctgcatctatgtacacctgcggctgcagtaaaaatgacattaaaatgaaagtcatatgcacatggttaactcgccacgcataaccaagccgtaatcattttgatggccctccggatggaggatagcatcgggtcctccgtgggtgcaacagtttaccatgtggctgggtgtgctggcaaaattagtttgccttaatcccataaagcgctgccaccgttgatgatgaccataatgaccataatgacgataatgatgatgctggccagcggatagagacgcgaaccgaaccgaaactcgggatattccattaggggaatgggtatgcgagtgcgaatgcgaatgcaaaacgcgaatataaatgaacattttaatggaaatgacaacgtaaaacagatgcagctaaagtacgatagaaatatagatacccagcgaaattccatcaactgtttttcgtcgaaaaaaaagaacttccattcccatttgaatagcttatagcccataataaagttgctttttatagaacgtaatcgataaatgaagaagaggttacaccagaagaagatttgcatttgcattcgagcttcaaagtatttagttattttacaaaaaattccactatttgcaatactttttggctggtgtttttcattttccagtgcgaaaagcgcaatctagtcaaatgtgattagtcgataaaaagtcataaagacccctggctgtaatcaagttattatctttatttttttttatgaaatttaatcagcttaactcagttaaattcgtaggttgcgcgtattaaagtctgagtcagctgacttggctcgatttacgaatgtgtagatatttctatactcgtatatactcgtatattccgtctataactgccggcgaaatggttgtgcattttttttttttaccttcctttaccggcagctgcggaaattgtgaggaaatgaaaatggtttaacttttctttcttgtgtgctctccgttaacttttctatttatatttttttttttttttgccaaccacctcgcacccaaatccttgactgctgtgggtggaaaagcgagaaaagcgaggggccggccggtggacttttcattcagcctcttattactcgagcccaactatttatagcttctcagttgtctgtgcaattgccgttcgtgtgattgcagtgcgttgagtgaaccaccttgacccactctaattgcaattgcaccgcctaatgtccaatgctctcagccgagccaaaagcaaaaagcaaataaaaagtgaaaaactgagcaaaaaaaaaaacaaaaagtcagtcaatagtcggcttttggccaggccaatcagttgggggcacttaaacgcccaattggttattgagtcgatagatatttcaattaaattttcatcgcaatcgcgacttgtttggtgggcggagcaaacctttattagttttaaatatttatttgttccaatgcaggccgcagggcaagttgaatattaatgaacctaattgaaaaagttcggatgaaacaacagcgaacagaagaacaataacccaaagtattttgcgcagccaggaattaattttcaaattagggcgaataaatgttgtgggcaaaagttgctgaaagcctccaggaaatcataccattccctgggccaagtctcaatactcaatttacataattacgcacatttgacggaaacttataaatatttatgccgatgcttaaaatttaagttacttgttggttgtgcagacgacaaaatgtaaaaaaagggggcagatttctaggataaaaccagcggggctgagaaataaggtctacaattaattcacaggcaggaaagtgagttcatgtacaagtaaactcttcagatatttaaatatcttaaaataatgatataggaagatttttctaacccataatcagcaaaatgggaactttatggtacgcagtgtttgcaactgcttagataaatgtgttataataattccttggttatctacagtgaatcacatcacaacactcattactcaaacaataaccattcgctatctgtggcgactaaaagtgttttataagcacgtttttaaatgcatcagcagttgcgacctcatgtagccttttactgcgaatcgaaaagactacgccatcgaaagcaatttctataaaaataaagaaacccaagtgaaaagtgaattactcgtaaattatatttgtcgcagctcgtttttgggtagaactgaaatttaacatgaatctcacgtcagtcgtttcgccgaacgacccagtcaaaccaaaatctcaaattgtgcaatgttgaatcatgagccatgagcagagttcggcttggatttggatttggattgatggacggacgggtggtggtgatgagaaacacggtgatgatggatcggatcaggggatgcgggcgggtaattgccacccaaatgagcgacagccagcaggtgaccactggccgcaggtcgaactcggaataccatccaatgccgcatctgtccctgaaaccaaagacactagaataacaagatgcgtaacggccatacattggtttggcactatgcagccacttttttggtgacggccaaaattactctctttcggctcactcccgctgagagcgtaagaaatctaaaaatataatttgcttgcttgtgtgagtaaaaacaagagacgagaacgcgtataagtgtgcgtgttgtgctagaagacgattttcgggccgaaatcaattctgatcgaagaaacgaatttacatggtacatattagggtagtttttgccaatttcctagcaatatgataaaataaaaaaatttttaaaaattcgcgccctgaatattataattttaaagctttttaaatttgtttgttaaaatcgccgctcgaattagctaccgtttacacatttatatttatgtttaattctaatttgtctctcatctgacaattttttaaaagcgaaatattttttttgaaacacttttaatgttaatgttacatcatattaagtcaaatgatttaataaatatactaaataagtaaatatgataactgtttattgcaaaagtaatatcaaagacactagaattattctagtgtctttactttgttcatatcttgaggcacgaagtgcggacacaagcactcaacaatcatttccttattaatttttcacacgccgcaagatgaatactctaatgacaaatattctaatataaagccatttttgaaatgtatttttttgataatatgtacatagatttggctatttctaacctattttcaaataataataacgttaaggcaatgcaaaacaagaatttttcgcatggtgccaattgatcaaaaataatatagattgaaagtctaagaacttctgaggtgaagggcatattttgtcaaatttacaatgcatgagcatacgtgtgcacacatacagttgtctgctatcactttgtgcgttgaaaagagctgttcgctgtagcgctcttcgctctctcgctctctaacaaaaattcgagagagcctggagccacctctagagccacggccaaaaaatcgtgtgccaaaaaatcgtatggcgttacgcatcttgttattctagggtctttgctgaaacccaaatggattcacacttttcgggtgtcccattgcacttgcagtgaatcaaatgagtgccgagcatcgctttcagtacttttccatgtatttccactcgaatcagttgtgcatgaaactatgtttctgatatctcttggcgaaagcggataagtgtgtgcatattaattaaataaataagattcaaggtgattacatggatggatttactctttgtagcaaaactataaagagtctataaagaaaggtgacaggttaatcattacatgtcgcagtttttagcttatttaaactgtgttaaattaacaaattgacaagaacaagatgtttatgcatacaccaaatggctgagctactgaccattaagtcatatttatttcgcagtatatttagaaaatcgaatacgatctgcctactttatgctgttctttcaaaatgtgaatcaatctaatacttacacattcatatacgaatatattcacattcaattaagcacaatcctcttgcacttcctttttgcagcacaaatatgtcgagcgattcgagtcgaaggatccaggtgcccgaggagctgaaggaggtgctgctgcagttctcgatctcctttctggtggaacaaccgccggatgtgatcgattacgctgtggagtacttcaccaaactgcagtcggaacgcccgagcgtctctcacacggatcaaagcaccgatgaccagctgagcgtcaactcacaggatgccgatggtaagtggagtgttctactttattcgagcagcttctttaagctgccggaatccgttgtgctcctcttctttttttttctattttcgtttacaaagcaattcgattgcgtgtcctgtcaactttttcttggcttaactgccagcccaaagtcctctacattttgcattttctgctgctgcgtgttggaaaattcctgccggggatagttaaaaagtgcaactacatacacatacacatacttttttcagagctcttttcacccagtccgtgctccatttccggccaagcgattttccatgaactactgcgtagtggatgcaaatctctgtcaattcggttcgacatatagacaatctgctggtgtaattcccccgacaattctggccaatttttttggccatgaataggtcgggggaaatcaagatttatttggctggccgaaattgaaaagttttttccgtgcctcagatgattttaccatcctttcgagctttttcctgcggcacgtgttcagataattagcctgggccacgcatatggccataaatcgttgggctcccaccacgagcatacaaaataagaaattaaataatgatgctgatgaagctttggccgcgttcaatttgctcctgatcctgctccagattctgctcccgtttctgccccactgggtgggcctcctctgtctgcgggcttttgttcacagcttccttttgcgtgtttatcttccggttaatcaaacacgcagccctcgagggaggaggcggacgacgccatgtcaagtgggtggactgccggccgggcggacttggggtggcagataaaatggggcacactgctgctgtcattaaaaatctattaattgtgcacacagcagaccgaagagctgagccaacttgcagctgccaatccttttgctacttgaatactagatccactcacagtcagactttcaaaacgccaactagcttgtgtcagttgaaggggctttaactaggttgaaggattatattataaagattatacatctatatcttgcttaaaaagtaactgaatgataaacttgtacttactctactcataagttacaacacaaaagatcaaactttaaaaggtattaaaggagatgctttctcatatatacaaaatatattttagatagcttgctggaaacatatagttaattaatggatacatttaaattgtggaaaactttccatttgtaatccatttcgataactagtgcctgctagaaccaccaaacttccagcatattcattccggattcaaaagcattatagttttagacctttgtctcactattaacgtctggctgccatggccaacttcatccgctttggatgcccagtgaagccagcgaaattgcttccagcttctgccagcaactgaagcgaaaatggcacgcaaatagctactggccacgcccagtcccagcccaaccgcccacttaccaggcttttccgccctcttggatttcccatcgatcggaatctgtatttttgtgctttgatgtctattcgtggccggaaaccttgcagaacagtttctgtttaactttgggctttaaacttgctgagacattaatatcgcgcatacgccgcgtaggcctttgtggctcaataaggtgtgtgtgtgtgtgtgtgtgtgtgtgttttggcaggtggtcaaaggtatgcgcttggcatggtacattttattaacactcccgttggccacagcatcaaaccgaggtaaaaagcaggagcaacgggcggatggatgagcgtatggccaggctatgggcaggcagagggttatgttttgcaggacttgctggaccagtgaagcatactgatgaacagctcagcagccgcatacgcttcatcgggcacacagggcgcatgacacgccccgtgggaagggggcggtggtttatacttgaggggtgcgggggctgggcggttgtcgagtggagtgagttacatttcaacattattgacatgccagcagcgtttgtggcaggactccaggctggcactcggtggcccaacctgaacggaaatgccatctctttcctttcatccatcctatttgctctgcaacggagcgtcctcctgttgcgcttaataataatgtgtatatgaatgcttatatgaaaaagctgagggaatgctcatgttaatcaagacaaagcaaagtggtgctgctatttataacgcagcacggaaagaatttagatgggtgtcattgtttgtacggaatgataataatatgtacgatggatatgcttaaaatgtattaaactaaagctttgaaacgtctttttagcagctgttttcctgtaaataagtgttatttccagtacaatagatcgttttgtttgcgaaaccaagtgttgtccaactggggggtcttttctctcagtgcttagccaacaaagcgacagacagctggcacacacccacccacacacacacacacacacacacacacacacagggagctgtataaatagacggccgactaacactggaccgcttgagtggcgtgttgggctgcctacttacaggcactatttccgccttggtttgacgtttgcctgtcatcagcgactccagcggacgtggatggcgatgtggttggtgatgctgcgatgcggcgatgctgtgcctcttgtggcaccattggcactttcagtcgctcgcaggacgtcacaaggatagcacgcacatccaaaaccgtccttcagtcggtttgtcactcagtttttgagcccgtttgcctgttggccaggcattcatttattcactcattcatccattcattcattccggctcacgtcatcagcgtcggaagttgtcgtcctatataaaaatatatatacatatatatctcgatctctcgttgccgtcactcgcagtcgttctcgttgctattgtttcactccgctaatgaaattaatgtagacaactttttatttgccatccttaattgaattccccagcttatttgcctgagtgcatgtgtgtttgtgaagcaagaaacttacttaattgaaatactttcggtgcatcaattaccaaatgatattcaaagttttgccagcgtactgagttgacatctaaaatctttcaaatctaaatatttcccgtaagcaaaacactttgcctcaattagttttcgtttttgaccaaagcaaggatttagcttagtatacaatctgatttcaatttgaataccaaagaagaagttgcactttattttagagtgttaattacttttcagttgcaaagaaagatctaaatctaaagatgataaagttcaatcttgtgatggtctcaaaacaacatcgaataaatattttgaaaaatattgtgcgcagttttgactagatagttccatgttgaaaaatcaaatatcccataaataaggaaacgtaagtttatgtgattgatagacgtttgcaaatcttcttctaattaccagactgtaaatcagaaatctcaacataccttgcacattcggctgcaatacaaaccagaacagatcacggaggcaattgccatccaagatttcgaacgtgggcgtctctactgctccacacacaatgcaaacagacagactagacggacgagatgggtgtatatacatacagggcttggataaatacttatctggaggggaaatggacgtgcacttgtcccgtctaggtttacaatttttgtggcctttggcgtttaggtaaacttgagggaaatccagaatgcgtgcctgggaaactgttgcgtaattgcatcattaggttgacactctaactggcaacttgacacgactgtgagtgcaaaactgcgggctgcagtgtaaacattttgtgccaatccaaatacaaaaccaaatctgaatccgaatcagaaaccgaatcagcaacagaactatgtgattttgatgtggtggaacacacagaacacacatatatacaaacattttcgactgacttgctgaaggctttgccaaacattcgagtgcataaatatttattacgcatacgcagcgtgtgacgggaaagccaagcgctcggtgcttgcgctggatttgtatggtttttttcactctttttttttgcgtctacatacatcattcaccttgggttacatacacacccaacacatttttatttctacttatttttaaacgtgttcatgcctaactggtttttattttcgcgctcgttgcaaacgatttgaaatcgtaactaaattcggaaacacgcacagaaagcagcactagtgcaattgaaaatgtccactcaggtgtctggtaatttattggctggtgagtagtggctttgctttgctttgcttggccaaagcaaaaaccgaatttcgttgaccaaaaatacatacagtgtgtagacaaaaacatgagcacttaaggtgttgttgtgctcggtttgaatgtataattacagcaatcggttttgcggtcatgtgaacctgggcaaacatttaaatatctgtagcaggcagggaagtgaaacgatcagccttgattgcctcgcatgttttaacaaatattctgtcagctggacaatgcctcatatttgtgctgtttctgaaaggcattctgcgaactatagtacatatctgggattgtcacacgcaaaaaaaggtcaaagagttcgccaacccattctaattttagcagtgactctgatgttttaaagtgtggaacacaatggaaaacagattcaaattgttttttgtttggaaaaacaaacaaataaatatgttataattctataaaggtacatcaaagctgtatcgaattcaatttcacttaatagccgggtaataactttctttaaaaatatcttaatatctgataatatcttaatatctggaaatgaatcttttccggtgtaaaagcctgaagctgagtgaaaaatttgtgcagatgctttctgggttttccgtacatggctctaaattccattggattatgctgcctgtcgttgatatgcgagctcctctgcagtttcatttgaattgcaattgtggcgcagcatgagatgtgccagaccagcagattccaggctgatgccagtgcccagatagctgggcattttgtcgttcattaaatgaagatgttgcccttccatgggaaacactttgagaggcactcaataaacaatatataccatatgtctgatttatgatttcgtttcgtttcattgtgattcagcggaaccaccagtgatggccagctcgcgtcgcaaatcagttttcgccgaggcctacgatccggaggcggatgacgacgatgatggcgccaccgccgtgttccccaagacagatgagcagcgcgcccggctggtcgagtcggtgaagaacgtcctcctcttccgatccctcgagaaggagcaggttcgcatctatacactacataaatcataagtctctcgggggatggaaaagaagcaggcatacacgcatcagtgtttaacccgaataagtgtctgcctgcggttttcctttttgcgggggattatcccccatcaagctggcttcccttcccgcgctccaccaaaaacacacccacaccatgccccttgtaactgatttgttttcgcagatgaaccaagtcctggatgccatgttcgagcgaaaggttcagccgggtgactttatcatccgccagggtgacgacggcgataacttttatgttattgaatcgtaagtaaaacaaaacaaatttcaatcaaactccatgaattatgcacactttctgtttgccaaaagttaacgtgaagttgtggtaacttcctgattttgtttgggctatcttaagcttggcatcgatatggaagtactctctttaaaattattgcaaacctgtttagaaaaatgataagctttactatggtactaatactatggtattttgtggcatttcactttgaataaaacaaatatttgtttaaattcatcaatgctgcagatataagcgcaacttcgtgctacagcaaagaacaacataaaccgcaatcgagcaaattttccatatatattgtatatatggatgcgaattaaccattttagaatggactcaaagaactttaaccgcaaaattactcacgctggcaagagaaagctcattcatttgcgagcggcttaattaattcgtgtttgaatgcgaattagtatttgatatggcaattaatgagtacttgcatattgatgagcacacatacacgcagcgcatcaattataaattgcattcaattaatgtggatttttcgtgctttcccgataacctcgtaacccccgcatttttcacttatcccttttctcacagtggcgtctacaaagtctatattaatgacaagcacattaacacctacaatcacactggactcttcggtgaattagcgctgctctacaatatgcccaggtatgtgcgactctcgtatttgatcgattcatttagtcaaattttccgcgctgtctgagccacaattacaatgtgctaatggctgtatacataagtatatatatatgcatagacatgtctctaatgttgaacttaaatatctagagcggccaccgtgcaggcggaaacgagtggtctactttgggccatggatcgccagaccttccgccgcatcctcttgaagtcggccttcaggaagcggaaaatgtacgaggagctgttgaacagcgtgcccatgctgaaggccttgcaggtgagtcccttcggtcccattgctcccccaatcgatatcatatatcacccatctctcttgtgctccagaactacgaacgcatgaatctggcggatgccttggtttcgaagagctacgacaatggcgaacgcatcatcaaacagggtaagtgaatggcaaagttcggggaccaactccctgaggtgaatcaacgtgcaatctttgctatttttctgtggattgtgtaattcaattttgcgaggaatagaaattaaaccgatggaatggtaaagaaaaccaaaaacctcaagggaaaccttttaaattgttataattatttattaataatcttgggatttaatggaattaattcgcaatttattgtgatttccataaaatgtttatttcatacccgcaaaaatataactacttaaatatatcatcactttaagctgcaaagattggttgaactttagaaaaaaaaagagtttcctctctaccttttggagccctcctaatgtcagcgattttttgaccgattcccaggtgacgccgccgacggcatgtacttcattgaggagggaacggtgtccgtgcgcatggaccaggacgacgccgaggtggagatctcccagctgggcaagggacagtacttcggcgagctggcgctggtgacacatcgaccccgggcagcatccgtctacgccacgggcggcgtcgtcaagctagcatgtgagtgtcctggccggcggaatggctacacggaaagcgtttcagtcgatcccccgcttgacctaatccctaatgcttttgttctttgtttgttctttgtcccgtccacgtcccatgccccattcctcgtatgttttgtgcactgtgtgtagtcctggatgttatttgcttcgaacgcttaatgggaaagtgtagtgggggcattcagcgtagcattagtggatatcgctatctggaacaggatctgcgcgaatatttcggcaacttgccgcttaattagctttgtagttgtagaagtagtagtagtaatagttggaatcccattttcatggccctaattgattgatcaaaattgatttaagtctcaaagatggatttaaagtttttcgcaagttgctaagacatgcggtcatgaaaatgggtcctttaattaaaaaaaaatatacattaaatttatataatttaactcaaaaatccgtccagtcctagacacagaggcctttgagcgcatcatgggcttcctgaccgatgtactcaagcgcaatatcgtgatctatgagcaaatgttcaccgacatggcccgccgtaatacgaatttgtgaagaaatcagtttgaagcgttcttatttgtatagtttattttattccaaatttgcaattgtaccatataccatcattcaaatcaaaccagagctatacaaaatttaagaaagtaaataaagccagtttcgttccgacacacacgcacaagatgttacatgttatgggaacatccacatcattcctgaaattaaacccacagcactatgaaaatttcaatgtctgaagctgacacaggcactaaaggttgatggatcggtaagagatcgaaatgcagatgatatagtggggcctgtggtgatcaagaacttatacttataattggatttggtgtgtggtgtggctaatacatatgttgtttaataagtaccactaaacagctagttcccaagaaatcccaacatcctcagcatgcactaagtgtttcagatgcgttttattaagttgatcttaactaatgattataccactttttcatctagtcctcgatgtcaaggcctttgagcgtttgctgggtccctgcatggatattatgaagcgcaacattgacgactacgagtcgcagttggtgaagatattcggcagcaaaaacaatatcaccgatacacgataaaaagtctgaacaatcaaccaaccaacaaaacaaccaaccaagcaaccaagcaaccaacaacaaccaccaccatcaacagctagaacacacggcaactgaaagtgaaaggtcacttgcaggcttcttaggattttaatttgtaaccatgtttctttctaattgagcaactctacggacagcagataagagcagatcacaagccacagcaatgcacaaataccaaacaaaacacaaggacacaaaatcatttaaacttaatcatgaataattgataattgaaattaatctataatactacgataataatgattatgatgatgatgagatagtgttgatcatgttgggaagaagcttcgccatgtttcttatccaaaacagaaaagcaagcaagctggcgagttaagcaagaattgtattgtatgtatttagcaattgtaatttgtaatgtatttaattcggcaaaactgaattcaaatgcaatcagcaaagagaagcaacaacaaacgattggctcaacggaaatgttaaaaatactaatttaagttttgtttattcataactttttgttatccattgatttattcataatttagaaaataacgcaatcacttgtttcattggctgctagttactgataagcgaaaagtaagcaaaatatatcaaataagagcaaatagaacacacaaa

SEQ ID NO: 20 - protein, 377 aa, Drosophila melanogaster
MSSDSSRRIQVPEELKEVLLQFSISFLVEQPPDVIDYAVEYFTKLQSERPSVSHTDQSTDDQLSVNSQDADAEPPVMASSRRKSVFAEAYDPEADDDDDGATAVFPKTDEQRARLVESVKNVLLFRSLEKEQMNQVLDAMFERKVQPGDFIIRQGDDGDNFYVIESGVYKVYINDKHINTYNHTGLFGELALLYNMPRAATVQAETSGLLWAMDRQTFRRILLKSAFRKRKMYEELLNSVPMLKALQNYERMNLADALVSKSYDNGERIIKQGDAADGMYFIEEGTVSVRMDQDDAEVEISQLGKGQYFGELALVTHRPRAASVYATGGVVKLAFLDVKAFERLLGPCMDIMKRNIDDYESQLVKIFGSKNNITDTR

SEQ ID NO: 21 - DNA, 1729 bp, Drosophila melanogaster
agaaaaaacgacgcggaaaacgctgaaaaggaagaaaactctgctctggagataggaaacaaggacgaggacccagcacctgcaaaaggagcggaaaattgcgggacaagtgttgtgcgaatttcgcggaaagccaggaagtgggcaggaaaacggtgaaaggaaactgaatagctcgagaggactcgcagctggagagctatttgaatctgaatctgaatccgggtcctcgcagctggtccttggccatgaacttctacgacgaggagatcacaatcggcggacccgactccaagcacctgagcagtgttcaaatggagccccgaaatggaggaacaggcggtggcagaggtggtgctggcggtggtggaccaggagcagtgggcggagaaggagctgtacgaagagcagccgcaggcaggcaccgtcgaatggtgagtggtaaagaatttccacggtgacgaaatgaaaataagtattaaggagcaatttaaatgcgtacaattcttgttcaatgaatataataatttcatatatgcatattccttccatgcaacagttccaaaacaactctactgatgacgatggtctgctgcaggacatcattgatcacgatgacgaggcggaggacagcgaggatgacgatgacagcgagatgcagctgccccagggcatgaccatgggcgtgggaatgacgggtctggtgcccgggccgaacatgcaaaagcggccgggaagcaaccgaagttccaagcaagtaccggatgacaccctgagctcgggcagcgaggaggccgcaatgggtggcagaatgggatccggaggagcaagaggcggagccaagctaccacatcaaaagctaacgcttcccatgaggggaagtgctagtggagcaggaagatctaagcggcaggatgatcaatcctttattatgagtgccgacaaatgggaggatctgtccgtgcccggagaactcaaggaactctttccctacatcgtcaaatacaccccgcaaacgatcgatactccgtttcacctgcaacctttcatccccgagtttgtgcccgctgtgggtgatgtggatgcccttctgaaagtccaggctccgcctcttttgcagccccaacgccagaaggatctgaacgatcacttggagaaattgggcttatggttgctcgatgagccctctggcgctcaaagtgagcccagtctgctgaatatgaaacttcggtcggtactgagtggcagcatggggcgaaatccgcgtcacgcctcctccgcatcactggttcccaccgcccgatcgggcaaggatatagagaagtggatcactgaggtggaacaagtgcatatgactcagtcaatgtacgatgtccagcccagaaaggacatagatgccctcctggaggattggccgagatcctttggcgatgaacaaaccattaatgcccttgatcaggcctacagatcctgtctgcagcagaacatttctgtagcggaatacgtgggagttctttgcgagagattcggagtggaaggacctttggagtcgcaggcggactacatccataatgtccagacactctttgccctctacttggccgccagtcaggcgtgggaataatagatgcatataaaacataaatcatacaaatgatcaaggaaatcaaaacataatttgttcttaaaatatatgttttaaagttaataaaatatttattcttatagc

SEQ ID NO: 22 - protein, 416 aa, Drosophila melanogaster
MNFYDEEITIGGPDSKHLSSVQMEPRNGGTGGGRGGAGGGGPGAVGGEGAVRRAAAGRHRRMFQNNSTDDDGLLQDIIDHDDEAEDSEDDDDSEMQLPQGMTMGVGMTGLVPGPNMQKRPGSNRSSKQVPDDTLSSGSEEAAMGGRMGSGGARGGAKLPHQKLTLPMRGSASGAGRSKRQDDQSFIMSADKWEDLSVPGELKELFPYIVKYTPQTIDTPFHLQPFIPEFVPAVGDVDALLKVQAPPLLQPQRQKDLNDHLEKLGLWLLDEPSGAQSEPSLLNMKLRSVLSGSMGRNPRHASSASLVPTARSGKDIEKWITEVEQVHMTQSMYDVQPRKDIDALLEDWPRSFGDEQTINALDQAYRSCLQQNISVAEYVGVLCERFGVEGPLESQADYIHNVQTLFALYLAASQAWE

SEQ ID NO: 23 - DNA, 44529 bp, Drosophila melanogaster
gcattcggcttttgaatcttctggcgtgcggacgtaaagtaactgcgactgtttcgtctttggtgcgcgtatactggtgccgttttatcacgttgtatcttaataataagcgataacagcagcagcattggccactaattaaatgctgaagtgactgtgtgtcaattgaatctgtacgacttttgattgaattaaattgcgaattacaaaacacaaaagcaaacggcaattaacggttataaagccggaccagtgcggcaataaaaacaatttgatcgggtgccaaaagatatttttgcacacactccttttttgggataattaaaaggacagtgcttgcccgtgtgtgtccttccgctggactggagtgtgtgtgtgtgtagtggttgtgaaggaatttctcattaaaccgacgctaaaaggattacgaacccgttcatcttcatcagacccgcgtatcgagtaacggtaagttgcgggggattccaccacatatgtacatttatattatcacacagacgaatttaatacaggcctaatcattaaaaacgaaggaggaagtggaagggaaagataatcgaacctgttaagttgttgagttactaagtaaatttctttcttcaaatatttcctaattaaaactcaaaatgtatatagggaatctcttttttttcactgtgcacatcattaattcctcatccgttttacgcgttggctttcacgcgaccctcgcaagagttaaaaagggttgaccatgttttggccggggtcaatatgcttctgttgaggttaaaccgttctaggggaatacaaatcccaccccgcccttaccgccttcaccacccacataccgccccgccccattgcgagccaaacaatgaaagcccccaaaaaaagtgccggcaataaaacgaaattgttttgaattattgagatctggcagaaagagcggcctgtaaccggatggtaactttctggtttgggctttttttcattttgtttaaatataatttatatttggcgcatatatagccaggatcacgggacccggaaaaggactgagcactcttataggtgtctgggggcattaacggttaacatgtttgcggtttttgattgctgccaagtccttttatcagcccataaaacgagggtctcccaacgcctgttaccgcccacttttggggccatatgttgggcgtgaggaagttcgaaggggttggttctttggagtgggtgttgtggtttctgcaaattggcgaaggttttatagagttcagtggagtaacaaccagtttatcaattttgtgcgcagcttataagataagagttgtatgcaaactgcaaaacgggtcgctgtactaacaacaacaatacggaataactgggaataaatataactgattactgatcataaaaccattcattaagctattcccaaagggaatttcccatgcaccataaatacacttcacatacaaacttaggtttaattaaccgaaaatccatgctccatcaataatatcgaagggcatcattttcgctttcctttttctccacactcaattgcagcctttagccaatattaagattcatttgcagcgaggagaatctaatttcttggccaagtcagaggttattagccatccaaccacatgcagcattcgacagccctgcgtggctaattaatttccattcagtgaatggaaatacgtataccatggaaaaccgcaaattaatttcccgacacaacgagagggagtgagaaaaggacagacagatagatgttagacagaatgtagctgttagatctacgaggagcagttactgtggacgacagtccgtttcatttgtatattgtccactgtccagcataaccatttatttgcggccaatataaattcctcgagttctttctgccattttcatttgtatttgcggcggctgctattgctgtttattgtaattttttatggtccatagtctatggttcttcttggccttataactagcgcgactggcgacttcgacctatataagcgattctattgtgcccaacaacgtgctttggacatttcgcagccaaggcctgaaagcagagacaccagcgcgcatttccactttcgcttttcattgtgtgtgtgaaaatggaaaataaaggaaaggcaacgaaaatgtttgcttatctctgtgcctacacatttttatgtgtgttgtgctttgttttctgggctccgttgatgggtgtcggggcttaaggactctccttttcgatttttttgatagtcatcagcatgcagagccacatggctgctgctgctgctcctcctgttcctcccactcctcctctaatcttcttcaagttcagcgaaagcgaaaacgtggttggagggtcaccataaaaatgaaaatcgtcctacggttgaaagtttgtcgtttacccacagaggcaacgaattatgccagattggtttttatttaaattagttttagattcctttaagcggagcgccaaggctcccatgttcgctgaagtgttaaaacagaagatacagaaattgattttcgggctgagattgagaacttgctgccctccggattcccttgcctttatggccaactcagctgtccccagccgacaaacgagttccgcagaagtttagccccagacccgaataaataaacaaaaatggctagcttttggggggctgaggaatccgatttcagtgtcgcctatcaatgacaaattgcacatgatttttactgtctagcaagcaaatgttttcatacactgactgctgtcgcaaactctttggctgttcggttattctttatatttgtctttttattgtgtctccaagtgtcaaagcaccccttttcaaaagagtcaagtaataatgacagtttattaaatgccaattcagatccacatcggctagcccatggaaagtttggcaaacagaaaataacacacaacgcttgattgccgggcaaacttctttcgttaaccttttcggctgacccgggtctctattcctcatcagcataatcccgaggggatcacaaggggaaaacacacacacacacacacaactttcccaagccaattcaaaatgaaaatacaaaaaaacaactccacacccagccactcaaagatagctttggtaaacatctccggctgtagaaacatctccctcccggccagtcgttgtatcatttatcacagcttacacaccgaaaatatcatttacatggcaaaggctgtgaaaacgcaaagtgaaatgaattatgctggaggtgatgaagttatcaagacgccatcaacgccacagaggcagaaagccttcaagttatcaatgagattgattattttatgaggcggaaaagcgccaaccatttcctcagatgccaattaatgattaatgcaccttgcaaatttataaaacatcctcttaactccattgtagaaattagatattctagattttgagccacactaataatatttggcaataattaagtagaatcattaaaaccaaaaatgggagtatgtttcaaatgtttagcacaaaatgtaaacacgtaatctatgaatattatgagcattcaatcatattgacagcataaatgcgacacatattatgtttgcacaacagaaaatgaatttacttatatacagctttaactctaccatcgactgcaattcaattttgtgctcaatataccagttctgtttaagattatggtaaactccttttaaaaccacgatctggattgcgataaaactagaccaagttcgttaaactaaaaactataaccgcaaaagatatgcaaatcttatcaaaatacgatcttaagttccatttgttggaaagagcaatttttagccattttggtctggtctggaacttgctaatagccaatttctaagaaaagtttttgtattgtctgtagctttgattgttatatcttcaccgtcgttctgctccatcatatctgcttcgctttgtcattctttggcattccaataaacagttctaacgctttttgttcttttcctttgccaccgcatgattgttattatgctgacccaatttgctcggtatatatgctttgtgtgattttcaattaccaaattactgaccccaaaaacgattactaaacagtacttcataactaccagccagactactagtaaccgcaagacgattgctttatcagcgaaaactcaaatggagcacagttagaaccgaagaaaagaaatacattgacttggaaatgtaattcaattcctatgcgtatcaatatcaatgaaggggggtatgggggttttgtgtttactttagataacttatcttaataccaaacactagcaccaacctctccgaatgccaatacccttgggttcctcgtatttaatttcgagcaatacaaagaaatcgctgtcgattagtttcgattccctcatatttattttttccagcaagttatgagctcatcaatggattcgacaggttggctctaacgatttgaagcttgcatttatttataggacttatcaacaatatctacacaggagaaaatcaagaattatgcaataaattcacttgaatgaatattttaatttataaatggtttgaaaatttaaaccatttttccttcttagtcgccttaagataattaattaaattgttatcatttaaagtttggcttcgatttgatttaaaggtctaactgcagccctgttgttctcagtgttcatacgtatttctatatatctttgccccaaacctttattttattttgcaatttgttgaggcagtcagttgttgttgactctcttcgctgagtcagttcctcgatgttctgttctttccgctgcctttgttgctgttcgacttttatcattttgatgtcatcgagcgggttcttgtgctcataaaaaatcgtcttacggtgttttgcttcttatgaaacctttttcttctccacttttaattttccattcttgtttgtttggctcgagttagttgaggcgtcagctggtcgtaccataattttaattaaaaatcgcttaaaatccttggaaaactgtatgataaaacgaaggggaagattaggatgcatagataaaataggcaaggggtggggggttggaagatgactgggtgtcaacacgtgccaaattgtttgtgtgtgagtttgtatctgggaaaagttttgaaaactttgtggagaacaaattgaaagagtcgaaagttgcagcgagctaaagtatctgcaagatataaaaaataaagaacggtaatgttgaagtttcatgcgcatgcacttcgacttttatcttgttttctggcataacactttgccgaattaacataagcatacggatacaaattgtataattgcccgaaggtggacctcatagtaccatttcatgccgtctctttcgctcggtggttgttgtggtgtgttgtggggtgtgccaccagggcgtatgatgaatttgacgcacgtgcatgtcacacgtcacagtggtggttgtactgctcgttgtagttgctttaggtatgcttttgttatcctgtcaggattcgctgatggcgttgtcaacatgctgcatgtaccgcactgtcggcttccctattcatatccttacgatcaagcgggaattttagtttgtcattgtggttggtgacacaataaggggccacttccggccagcgaaatcgggaagtagcaaaaattggttgcctaatcagcatacttactcgaaattttgagattgttcggagattttaatcgcttaaatcgacaaaatcatagtatataatatatataatatatatttttaagccgcgcaagggtgtttggaatttggaacactttcagggttgctttcaaccgattcccacttgtacatttctatgtagcactttccgctgcttgttcgtgcatatttcaatcaaacttgttgttgctggttttgttatgcctgcggcttacacagccaaatgcaggaattatcatacgcaccgttgacccaaattttttaaaccaaaccaaaaaaacacccttgaatcagcaagacacaaagacgagcccacatggtgaggcagagtcatttcaaaataatatatttggcagcacgtgcagagcggaaagagagggcacgatgactgccgagagagatgggggatagagacctagaggactgccattcattatgcttagtttttggggcgcggttttttgtcccctcgaattgggtcagcccctccaagagacccctaacaatatatgcagtttatatattgtataaaaaatggcccagcataatggaatggcattttgctcatagtctcatcccagttggccctcgagggctcacactgattcgcattctcattctctgtctttgctcattaggagacaaagagcgactttcactcggtcctgccactttagcctgcttttaggcgcttcggctaattatgaagaaaaattcgtccaatctgcagtggcccccttttctcctggcgaaagtgttggcaagtgaacttagtttcggaggatgcattttatttacgacaaagtgagcttgccgccagctgtgtgccacaagacttgaaggggcaagcgtggggcttttggggggtcgggttctgcgacgctaagagcaatggatgtggcaaattgtctttctggcggaggggagagattaatttataagctttctgaggaaatccacttaacaagagagaggttaaaaccttgtctaaaagaaatttagtgaagttgggcttgtgcttctgcgaagagagcaatttgaactattgcgactgaattaagttggtgttcaaatattgtagctacatatttgtaaaagttttaagttttatttaatacactcgatttctatctagatatcattccacatcgaaatctatcccactcttcattccatcaatgtctattcagagaactgcctattaggccaaagaccctatcgaaagttgatcagttgagcagccaaatggcttgtcttcttgtcttgtcttgccatgtttaatttctggccagcagctaacaaagactagattttgacagctctttctctccgttggccatagaaggcgacccaatgggccttacataatcccactggccattgagcatttctcgcacatggcgctgctgccccattgtttgtctgtcattattaatccaattagtagttgtaatagaatgcggagcggcgcgaggggagagggggaaaagtcgcgggttgcgcaacccagaaacgtgccccaaaggaaattgggtcgaaatgtggcacgagaccgcgagtggcgagaatcgaagccacttgcagccaagttgcaaggcaaggggagcagcatgtcaggggtaagcggcttaccatcagctacttagcaaccggcattgtttcaacgactatgctaatgatgctcgatggtgacataagcggccaatgtgcatccactgcagccagatgcggtgggaaaaggtcaagttcgatccatgtaaccacatctatgtgaaccggttgcgatcgaaacaaagtcttggtgttctactttcatgcaactttaagaaaatcacttttaaaagaggtttgtgctagggaaaataaatagataaacttattctaaacaatcgcacattttataaaatattttaaggtctaaactataatacatttttctggctaaaactttcattttttcgagtgaatgcaattaaatgtttattaattacagagctattcagaattttccccactttattctaattgccaatgtggggttttcttgatacttttattgtaccctggaagtaattcagcgtaaattataaccacaatcgcactcgttgacgtctgtttctgttgtttatttatagtttaattattttgcttgttcggctgtatttagacaagtgttatcccatttataactaggctttatgaggttaatgtgaacatttgctaattgtcagtgcaattcgtgtttttatcggttcggcgagtgaacgtgctctttacgccatttacgcagatgcggggagtttgtaattttggtttttaattttcaaatttcttattgaggaaacaccagtgtatgataaagcagttcgcttgaaaaccgggtctacatgttatcatcttttggtaggttcaaaatatttaccctgggaattggggaattcaaaaaaatcaaaagaggttttctgacatttcgcaccacaaactaaagagagtcgtgtgtgttttatcgttgtttgctttatcaactcccaacatgtgttttccaaagtgtgatatatttccactaccccgaatctttaacaaattgccaccaactggcacggactgatagctcaatatttacttggctaacaatctcaagtgacaaacaaatggagatctcaaccatcattttcgagtctccaagtgatgggttaacctttgacacgtatgctagagacctaagctgatttaccttgcaggttagacctaagaaaacattgtatactgaccaagtggtgagtaatcgcattagaaaaatggacgcatgtgtggaaaaatattaatcatcaagagaaaaccaagcggtgaaggaacagacatgaaagacgagaaatgattgaagatagctcattgagaattacaattgcggttggcaatcacgatggatgggatgggatgaaattcctgcacataaaagtgcttccacacgaggcattggcattgattgaagcacactcatcccaggcacacactcaatccgatgcgtctcccggcattatttgcataagttgttgaactttagataaacgttcctgccactcgctgctccgtgctccgtgctcggtgttcggtgtcgagtgtcaaactatctttgaggttcaatgggtgcaaagtgccacaaagcgagagttttaatttagcctcgcctcgggtcgggtctctttctctcgagcggttgagccattcgatggagttattgcttcggttagatccattttgatttgcataaattgctagcgggtctgcgggctgttcgaaactaccacaacttttccgtggcacctggcaaaactttggctcaaattgcttcgacctggggcagggaactcacaactcaatacttcgaaagcgtcacaaccaaaataaaaaaaaaaaattatatgaaatgcaaataaaaaataaacgtaaatatcaacaaaaatttgtgcatttcaactgtgaacgtgacattcatgagaaaatgtccaatgaacacaaatttccagagaagtatgaataaaattgataaatgaaagagccatttgttcaagtcagtcgtagacacttttcgttatgtattccttaatgttttcgtttctattttgctttcgatgggagatgagagttattttgaatttcagagaacttctattcatttagagaacagtgttgctgttgtagttttgcaatcacaatacagattgtaggtcatgctaatattaactaaataatatttcataaataagacgactatttccatttaaatattgatatatttaatgctggaattttgctaaactaaaatcgaaaaccctggtgaccttaacatatttatttttctgatttaatcagccagcattcttttcctctcgcatttttcgggtttttacaattctgtcaacattttcgaaactgccagtgtcttgtgcaccgccccaccacccaactgctgataagccgcgaagcagccgcaaaagcggaacacaaactcaaacgacattatcataattgcttatgcttcattacatatttgccagcgagtacatggcggtcattcagataggcttaaagctaaagtactctccctgctctctcctagcaacccgaaaacctaaccaaacaccgtagtcgaacccgcttttgtcgactcagctcgtacaaaaaaatatatatgggaaaaacaaaaacctataatcactgaataaacaagctgataaaacaaaagcaacatatttgtataagcgcaaatatttgagactcaatgagagcagactttcatgtgccatataagtgaagataaatatagagatcgccaaaaagggctcgaaaaatcactaaacgtggcaattttgggcacagaaaatacatttttcaagtatatattttgagcttggagtaaggcaggcaatattttttcaagctaaaggattatatatacattgagattagatcagcctttgaaaaatataggattaattctgacacaataacacttattgttaaaaaaagcgaattctaaggcacattttgttctgtgtaagaattggaattggaaaccgaacgcagatcccgatttagagtcggatgcagacgtggtcttataagactttggtagccgctctagtcggccggactaacggttacagcccgccccaaaaaagggcatggcctccacggacatggagcagcagcccatccgcatctaaaaatcatcgccatgtgtgtccgctttttttctgctccactgttatattttttttttctgtctctggccccgtgacttggcgattttattttcgctccatttgtggccataaatattcagtcaagtgtcatcgttgtggcatgtctagtggagtttgaaatgaaatagatgcaggcaactgagaaagacaaaaacgacgagcatatgagaaggcttaaaacgagttaagtcacttctgtggtcgcgaccaagtggcctcctccagctgctccgcctccggttctccggctgtccgctcctctggtcctccgagttgcaaaaccgcgactccccgcaccccttttggaaccgctcccggacttccaactgactgccaattgtggcagcggtaaagatttcgttcgctgttgtgtgtgaccgcagctgagacccgcaggagatgtacacagagcaaaatgcactggcccctaaacgagtatttaataaaaaggcatttaaaagtgttaggtgctgaaacaaaatgttgaacttagatttaaattattgtaagacatagagtatataaaaaagcttctttttttcacagaactccagttcaacttaaattgtatagtttagttgaaaaaggttacatttccgcttaatttgttctgtgcatataaaaacataaaaaaatggcgatggagaaccaaaaatgtggccaacacagatgggtcagacctaaaaagggggtcttggatggcgaaaagagtgatgtggctctgtagcgggtgttgggccaaagttatggcgttggccaaagcgttccaacagagcttagcaaaaacgagggaaccagcggcgtgggcggttcaatgaagttatcatcgctgcagatgaataaattttcagtgaacaagcaaaggatgtagattatcgtcgataagcacgacggattgttgagcgctaaagtcatggtgagataaaaacagattggattaggtgatcgaatctgttatttaaatgggacatagcaagaaagtaaaagctttatttattaacctcaacggttatagggtttatattattattagtaaaaaaaataatgaacgatttgtctttaaccaatcaattcagtcttcattgcaactcctcgaacagccctcgttgcaaagtagaagcactcacggaagtgcaatgcatgtaaaagaatcatgaatctgatgaagtattcaaaccagctactaaaaacactcttacgcacacatgggtcttaactccttggcacaggaagctgccaggattaactggccacttgaacacgattaggagtgaagggaggacatgcagaaagagttggcaagaagtgagttatcgagatgctggcgaaatatattgagattactaatcattgaacacttatcgggcaatgaacatcagtctcgccaagctagatagaattatctctgccccccgccatcactttcttacaatcattccccctctttcggtcgccctgcagccccccccctctctctctctctctctctctctctccctctttctctccgccagctcaatcacccgcacgtgcttgcgggttagagcggtttagcggttgttcacgctcaatttgcatgcatttcatttaggcggtgagcatggccctccatccatctctttcgaccgctctatacctctctctctttcgctgaattatatatttgcttcttttcggtttgctggattgctcaaagtgcacggccaggtcacgtttttgatatttcattcaatcaaaacaaattgctgtggtccgaagccctggaccaccgctcttaaataaataaaaaatgtacctcaacaatctaaaaaaaaatgcctgaccaagccagtggcaaaatctttttgcggttaacttatttcagcgctcaggtcgttaggcaaacgaccgtaaaaaaaagcccagatcgtaaaatagaaattagattaaacatcataaaaatgctgggcacaagtaacttagattctaataaaaaaaaaaaggaaaaagaaacaaaatggggcggcgagggcgtgtcctgaaggagtttaaaaattgccaattcctggcaggcactttactaattgacaatttccaactgaaaaagaaaaacttttctgtcgctcttttgtcgttttctttttgtaataaccccaaagtcagtcatttcgtctaagccattaaaaaattaattggctgccttcccttcgggcggaacacgccccatacatcgcactaatgccgcttttagccaagttaaatgcttcccacccaaaacaaacgccccagaagaacaagccaaacaacgcacaacagcgaaaaaagggcttgtcgtcgtcgtggttgaaaaggaagtaaaatgcttggaaaacatgagaaaagctgactcaagaaaagcgaagctactatcatagagttattagggaataagcagataccttacttataataaatttaaatttaaataaataatttccggctgtttaatttatcgactttttaaattatttgctaaaggtcaaatctaccgaattattataatattttgattaaatatttagttgaacatttcttaagcaaataataatttcatttaatttactcagtcttcctgctctagttggccaactaagttatgaataatatccggccatttttctacccttattacgaacttcctgtactatgtcagtataccctttctagcctagggcatttgagaaaacgtttaatcttgccacaaacttctaatttttattgcttcgctttgtcattagctttttgcttttatatatataagtatttttcgccagtttgtttttgttccgttcagttgttttgttcgagtggttctccaattgtcgggctgaccttttgtaggaacccctccaattatgagtttttcgagtgagcatctctcactcaatttggcgcaatttgtattttgtttttgccaaattcgactcattgtttattgtttacgccgcgtgggttgaccgaactgacgcaaccagtcgatatttttgtcccaccataattacaatatgtatataatgtatatgacgcggattgcgagcggataagataagattctgtaaataattcccacttccgttgccggccgaccgaccttccggaacccaaacaattgatatcaattagcgaggcaagtgaatcactctagaattcctaattgataagtcaaaaggttctgattaagctcagacatgagttattggtgggggttaatgcagagcaatgctcccgaatgctcgggacttcttcacgtttctcacatcggctgaaggcatttttatgcacttcatttataaatgaaaaggcttcatcccagttatgtgccccttcagctgggaaaagcgcaggagctgggatgcggatgggaatggaggagctgtagctgggacatgaagtcccggacggacaacccttaaccgtgtatagtctgtcggtcggtccactgccactgccactgccactccagccagacagtgtgcaaattttaatgagttggaaatttaatacccggcgagaagattgcaatgcgatggactggggagatttcgactgcggtaggtcagcccattggagcgcgagcgattcaattttgctcgcagtgaacttttaaattttccgtgaatttaattgaaattgaatggaataaggagaacgagtcagacggcatcaccttgaacttgtctagagcgaatgtcgtcatttgatttgagtttgtgatctgaaacaaatatgccaagtaattgagttgatttcgcattggagaactgttttcgcttccgctgattcttcgcacagtgcgcaatttctctaagataaatgttttcagtcgcagttgatttgaatgcctattcttggagaattcgccaagcaaattttgattaatatttatatttttgcttcttctctttgcagttccttcttcgattttttcatcgaccggaaacgtaagttcccaaataaaatacagttgacatgtagttcttaacccaattccgccttcgggccatttaaacttgaaagctgacgttttattgcgtaattttatgtgcgactcattttcattatcgttgcgatttcaagtcacatgatcttaaattccatttacggctctaataataattagccggcaacgagttggaaactcgttaaaaatcctcaaatgagtgtggctccatcccgctctcgcccctcatctggtaatagccccatcccgctctgtgggagttctaattgtagtttgagtcgagtctccgaaataatttacgatgctccaaagtttttttttgtagctttttgttttgagtttgtggcggtttttgctgctaaacacttttggttttgacttctacctggcggtcagaaattctgagaatttttaaattgcatattgagtggcagagtttctttcaaccagaaagggagacagactgatttatgatggtctagtagtctgatatgaaaattgtgcgaaaattttaaaggaagtgagggattgttcatgaaaaatcagcaaatcagtatataacatatacctgtatgcagttctaagtatataatctttatgagacactaaatacagttactatattatagctggggttattctacttgtaaattaataaatctataaaaacgtccctgctgtttagatttccgagttcctattgagctgatattgtcattgccattaaatttcaccttcagacactttacactgcttattccttgtcaatattttcattttttacgctactttccactgattgcacatgcaattctcagttctctcgtaatgcacgtatattgcaaaaatttgctttatgcaacagctttggcgtgtcaatcccaatgtacttattcaactgaaagatggtagatacactcgttgttagtagttattcaactgtatccgagatatacctatagtttattatccatctgtagctatacaataataagtagcaaatagctgtaaatgagttgagttgagtcaagtttattgccaatttgtatggattggcggagaagcccctctacaggagatttcagtatggttctttggaacttgatcgcgcacacatgtgacctccagctgaacaacttagcttcttgatggtgggaaacaaaatcttgcattgatatgggaattaaaaatagtcatgatgatcatgatgacgttccttttgtttctcattaagttgcatacagtagttaattatttcgtattccgctatttttgtttacctaagtatttatgactttgttgattttcctctttctattctgtggcatgatatcatacagccaaattgcagtaaacttccttttgttattctctggcatttaatttatttattttacgctttacgaacttttatttcgcccatcatttattaaatttcacgctttgggaatgagcaagattaattaagcgtttaatctttgatttatggagctccaatgtatttattttgggtggtcgcttttagccagcggcattgtaatcatagaagggttattatttaaacatggtatttattcagaatttctgtttgctcaaaattataaacaaaaaccaacaattcagcaaatccaaacatcgtatagatgtgcgtctgtttttttttgcgaaacccaatttattcaagcttaatatggcagtcagacaggcctaaaattgaattatgagacgcgtgcctattcgaacaccacaggaatttctgaaatttaaactctttgtcgatttattgcgctttaaataaaataggatagaaatagtagatatcagcgtgtatttttttttttttttttgaatttaaagtaaccaagccaatttgttttttttttttttttttttttaatttttattatttattgaatcttccctttgtgttaagagactaacaataagtgttcaaatcttaatctaacttaattaactttcacttagtgatagtttttttttttcattaatgccctaataagtttattgctgggctgggaggtcgttgcggtgcagccggctttgactgcatactcggattagttttcttgcgaggggatttgtatgggtggtcagcttttcgttatacttcgtttttttctcagctattacttcgattactaatttgatttttaggtctctgtgtatgttttcgtttcgaaggtaccacggcgctccagtgataattctcagaattcttgactgtgctcgctgaataatgtctatgttacttctggatgcgttgccccacagctcggagccataagtccagataggttttaagacggagttgtatagaagagctttgaactccagactaagtggagagcgagcatttatgagccagtggaggttccttgctttaagtttaagatgtttcgatttggcttctatatgtttgcgccaagtgagccgcctgtccagatgaactcccagatatgttacctcgtcggcttgtggaatgcatatgttattcaagaccagtggtgggcatgtttgtttgtttaaggtaaaggtaacctgcttgcatttttgaacatttattgaaattctccagtcggcaagccatcgttctacagatgttaagtgtcgggataggagtgccgtggcttttattgggcatttcgagcgactgagtatcgcggtatcatcagcgaacgtggaggttgttagattgtagtctatggggaaatccgccgtatacagggtgtataagattggacccagtacactgccttgcggcactccagcttcgattgcgcaatcgcgtgaagtgcttgtatcgcatcttattgcaaacactctgttatataggtatgacttcagtagcttatgtgtgttttggggcaacagcttgattattttaaacaaaagtccatcgagccacactctgtcaaatgcctgcgcgacgtctagaaaaatggctgtgcagtattctcgatgttcaaaagcagtacgaatttctgacgtgattcggttgacctgttcgatggttccatgtttttctctaaagccaaattgatgtgttggaagtgtgttgtttattctaagatgagggctaatccgaaggagtagcattttttcaaacagctttgaaagacatgttagtaagcttatcggtctatatgatgatggctgcgttttatcttttcctggctttggaatcattactatggtcgactttttccatttttgagggaagtatccaagcttggcgattgcgttgaacaacaggcagatgtgaagaatagcacactttgggagttcaatgagcattcttggagttattaggtcgtagccaggcgattttcttgggttcagttgctctttgataacctttgctagttcacatggtcggaattcaaagggttcttgaggatctagattggctgctattaaaggagggagaataaatgtgttggtagagggatttggtcggaatacattttgtaaatggtcagcgaaagcactggctctttcttcatcacttcgaaaccaggtgccagagggacttcggagtggcataattggcgctattggagtctttaggtttctgtgagctctccaaagagggtacttagtgctggtgggagagagttgctcgatatatgaacgttggctgtttttttcctcttgtttgagagcattggtaagcctgcgtgtggctatcttaagcatgtgcttagtaattggtgatctattagactgccaatcccttcgtaggcgtcgtttatctaataccagccgctcgatttcgcgattagttttgatgtagtttggttttgcatacgtcactggcggggttgaagcctttgcagccgaaactaaaatgttttcaagagtttccgttgacttgtctatatcctcctttgtagataatgccgtcgttagttctatgtgtgaacagacatacttttgataccttggccagtttgttctaaaatttgtgagtctatacggtgggtcgacgatgtgggggcgagttagcatatttagaaaaacaggtgagtgatctgatgataaatctgctagtgcttcggcggtgaccatgttgcgggggacatgtttagtaattgcaaaatcgatcaggtctgggatttttcttgggtctgctggccagtatgtaggcttacccggggatacatagtctagcttgttttctggcttcgtaagcgcattgtacaattgcttaccctttggcgacacaagtcgagatccccaatgggtgtgcttggcgttatagtcacccgctgcgatgaacctgtcacctagtgtgttaaagaattccatgaattgatcctcagagattggaaagcgcggtgggcagtagactgcggctagagtcgttgaaccattgttgagttgtaaggctatggacgtagattgtaagtagtttttgtcaaaattgtttaagtggtggtgttttatgcgatttctgatgagtattccagtgcctccatgagctttaccatctggatgatttgtaccatagaacaagtatcctggtatatgaaaattgtttttatttgtgaggtgcgtttctgatagtagcattacgtcgatgtttttttcgtaaatgaactgtgtgagctcttgtgtatgccgtgaaacgccatttgcgttccacagagatatccgtagggaagccattatggggattttgaagatacaagaagttgaatcaggatattttggtttttcatgagctcttgcaaagtattttgcatgaacgtcatgaagtctttcatgctttgctgtagggatagcatcatagcttcgatgccactttgttgtgtttgttggatgtttgtcggtgtatgttcggaatgagcagttcttgtcggtggggcgggcacttctagtccggattttagggcgctagcgaaagaaattgttggagtagtgcttgggacagttaggggtggttgaaaaatcggttgcggagagtagaaattgactttgttgtatgtatgtgctgtggcaatacgtttgtttaggcggctcttcaattctttgtacaccacacagcctctgtagtttgcagtatgtttttccccgcagttactgcatttcttcacagacttatcgtccttgtttttggggcagtttgcggtagtatgaggttcgctacagacaacacatacggacttaagggtgcagtatgccttggtgtggccgtattcttggcaattagtacattgaactggattgatacgtttgtgcggctcctccacggtgatcctccgatgtagcaagtactgtaaattgtatattgggtgcacttcgtttttctttagtgcctggagctctggttcgagttctattttgaatagtggctgcggaactttgtctttgtttaaaatattaatagctgtctttgcagaaaagtttttggccttcagagcctcaattatctcagctggtgtcactgttgcttcaatgcccttaagtactacctgtagccctttgcaactttttaattggtatgtgtagtagtttttaccagcatcatttaggtatttagtcactatacggtggtctgcttctgtttggatctgtagttttatttcatgaatatttccttttttaagtgggataatgtggaacttgctgtcaccaatcaaagcaacgagtttatttacaagtgcatttgtactttgttctcgtatgaaaattggtggaggcctggtcttttttggttcccctaccgttttttcgttgggttgttcggtcgcagaatcagccaagatagcatatcggtttgaattatttactgcagagttttcattgccgttgttggttcgattgattttgggttgattacctgccttattgttttgagggctgagctttctcttgatttggatgtagcgatccatgccagtctgcacagtcgaaatcgacttctgcttttgttttgattcttctttacgtgcattattgttgttgcaaacggtcagtgctgctgaattatttacagctggcacagcgataattagttgggccgctgacgaagttgatgttgtggcagttgccagtgaggtcactgcactcgttattgcagtgttacagttacccgggacggtcgtttggcgctgcgagaggagcggggtaggagaggcggtctcttcgctccacgacttgtgagccgaagcaggcagagagggagagcaagaacgcggtctgtcgttcgctgagggcaaaagtttcgagttagttgaaggtgagggtgctcgatcaccgatttgcggtgagacgaaagaaaagtatgcattgttgcgttgtaaagagagccggcgctcgtcttgttcacattgtcgctgagaacgtatgtcgttttgattcattgttctaagtccacatataacaattaccagaacaatatggaataattatttattttagtaaataattactatagtcaataattgttagttgtgcaaactgcactttacactttgtgtttaactttcactatactgttgtagtttttagaacttgctattcgtagcttgaaagaaacacgtctccacccgaagactgtggaatgccgaatgaccgaattcatttttaaataagattccaggaaagttctttcatatttgccacattacctatcactaatatattttttgagttaattaagggtgcgcaattttctgcgtatttcccatttttttcgtgatttaaaaagcaatgcaacattcatttttcagatacccactgacaggtgcaatccataccacagcattgctttagttcggtctggttttttgttcgacttttgtaaagcttgccgcaaaaatgcgtttaggccacctcaatgcaatcgggtgtagtttttttttttgcaaaaacaaaaaaaatacagttgcgtagcttggctaagcccacaaggcggcgatgaacagatatcgaaaattgggttaagcaacctgtagtggccaggtgtatctgtcaccagatccacttccattatttttctgtttcgctttttgcccaatgaaaatgaaagccaggcctcggtaatcaagaatacaagtgggtcgaagattttcgccggagcgtgaaagtgaaaagtgtggaaaagctgaccgactgctgatgactacacttacttttgagccccagtggccccatctcattacacctaatttgtttattttgttttgccgttaggttaggtgtcaacgtgggagaatcactaggtgcgtcggaaaagtttaatgtttgcatacagagagagaaaatcttagttatattttaactttatgtataaaatgggacataatttgtagataaattgataaaatgcccaagaaaaaggcaatataactgcaagcaccttaacaccttagtgatacgtatagccatatagtttctccatatgccctcttggctttccatgtttatttcccccataaggatcgacttgctcatttgcatgacaagctgtcggaagccggcgctcaattcacgcaacatgccccaaaacacgattcgactatgagtatgcacatgtatctgtatctacatatgtatactgatatttgctcggatcggctgcttaggctttgagagacaaatcacttttacctgtttgcgtctgtcgtctgccacttgggttacatatcatccgcagatactgggtctataagtggtggtcagtttgggcggtgtccctggttttttctggctttctaccccaaccagtttgttggattttctgtacgtgtcttttattttttttcccgcaaatttattggcaataatcatttggagcttatacaaattgcatgaacaaggcgaaagccgtccactcgaatgggccttatatattatttgcccatatctatatctttgatcgcttctatgcacatttctgtgtagaggcgttgtcccaactttggtcgaatgaaccttaattaaagccgagattggccgctgcggcacgattttctttcgaaattgaaccccattgttcagccgggctatcaggctatcattagatttggcctataccattactgttcagattatggacgaaaaatgcgttggccgttaatgtcgagcccaatttaaatgacgtgaaattaaagcgaaaattattttcattgcaagtgcttcagctttttgcggagaaatttttattacttttcaaataaaactaaaattgttatggcttaaaacgaattatgcatttcccggcaggaaagtaactttgtcaccatcagaagtcaagtttgtaacagaagcttggtgctcaatagaaactttgaaatgaccgagagaaatgctggcaataaaaaagttgctcaaaggaggctatatttatttattaatagacctggcggcagcctgtctctttaatacaggacgacaactaaactgtttgctattaaagccagctcagcatgaagcatagtttttccaacgccattttttacagcatttggggggcaaaatcaaagtgtaataaacgacagttgccatggcagcaatagcaaatattcagcaactgatggggagtctattgtttaagcgatgtcaatatgaaaaacgcataaatcttgtctgtggttgttggggcagccaaaacgggagggccttcaaaaatgaattcgcatttgttctacttatttgcatagattgggagttgacgtggacaaataaatttcggtgttccatattcggggcatgtcacgtgatttgccgaaagtcaaactcaatttcagtgctttcgtcacgaaacttttattccccctacaccatacatatatcatggcaacatcaatagaataggggcttggctggttttttggcgttggcaagtaactcgaaactcgttttgttctttcttatcggttaagttgcttgattggaatgcggttcgatgggctccttgtttcgataaatctcacaacagagtttttaattatttctggagagtgttggccaaaaaggaaaggaatgttttccgccgctattgagttatgcgttgcgatgctggtgaaaaagaaaaaacggaaacttgttttaggccttgcgaacaggaaacacgcgtctggaatcaggttttcttcgatgataatgatttttggcgtggcaggtggacgagaacttgttctcctgttcacacaagcctgctaaaaggaaagttcaacgttggtcggcaacaaaaatgattttcacacacgcataataaatgttaattcggcatttgcaaaacaaacattcagcggaatgaccttagtaaaatgtgaattcgcactctgcaattcgactcacgtttctgggcttcgagcccttgagcacaagtccatataatgtctatataatcccgagccaccaaatacgaaaacaagtgcgagcatgacatttaaaatttgaccaacacttttcaattgttcccatgaatcgcatgctaattaggaattggcggaatgattgatggatggccgttcggattgacacggggggcttagccgacttacaaacatttggccaactgcccaatacagttaagttcacacccgcacaccccaagacaattggtcttcgagttggttttccaatggtcggcaaaatgttttcggcattcggcgtttttaagtttttaagtttcgctttcaacaatttgaaggtctagctgaagaagcagaaaaatttaagttaattgtacttggatgggctattgtgcgacttgcattgtctgatttaaaagcatttcttatattgtgttataattttgtatgttagtcttattgtcgctgacagcgaaggccacacaatgagatcttcttaaattttatgggggctggtaaaagaaagttatttttgaacttagccaaaggcgtagccttgctggtgattaagggggattttactgaatcaagtagtgagttttattcaatttcctaaagctaaagatccaatatggcttggtcaaaaattcagagcctgagtcaaagttacaaaatgaagtttctttgccatattacccgtaacagattattaccatggcattaaatttatttgtgtcttaattaaattataatttcgcagggcaagactccccctttctacgatttgagtataaatttacccccggcgtgggtgtagctaattgtttgtggtttcttctataaaatttaaataaactcaaacgcatagcgtgaataattggacaaagacaacaaatcaaagaaagagttggccggcgaaaaaaaaggtgtccaagaccataaaacataatgtttggacttgactttcactcttctgcgaacattgatctccaaagtcagtggtggtaaaattcagaaggtaaaaccgcagagatcacagtgaccgctggctatggaatttcacttttgttttcgatacgacgaacaaatttgattttgacgactttgattaacatagatttcattcgactttaattcggtcttaattggacatcgtacagcgacacgtccagcaatttagccagttcatcaatcagtcaatcaatcaatcgcacacaatcattgtcaaatgaaattggtttccgtttcgtgccgttttatgagttttttgaatcctccgccagctgcaattagtggcaaatttgtagccagtttacagtgctgatggcaaaaagtgggggtaagtgctgttgactgaaatatccatccatagagacaccctttcgacttccgaactttttggccaacaaacttcttcgctcgtctcgcaaagtccccacaatcaaggcgatgttaattttacatattgcaacattttacgttgccttgcctttggattgtctctcgacttggctcacaaactcattacaatagctatggctgcacaaatgtgaacagtcagctcccagacgaactccccgcatcccgtctcattgtaatggcaaaacttcgttgatgctctcagagatgccaacagataaaatgtatctttaactagtttaggtacaaataaaaaggtttgaaacaaaaattttcttattgctcaactgcttctagggaaacccgattggtctggactccaattgttctgaatataagatatgcagatattttttaagatcagtttaagatcggtcaaatttcatatcttattctggataactaaaatcacattgaagttaatatacccgattaatgctcaccactgactcctttcgttccgccgtttgttgcattcaccgcgttgacaacaaatggcactaaatttttgccattgcataataaactctcgacgatgccgcgctgatgacgctgccatgccagtgcagatgaagggttcaccgtagccagtggggggcttcactgtacttcagtcgagttgggcaacaacagagacaataacttttcttatgatgccatttttcacgtggaaaacttgagccgtctgctgtgagaaattgcggtggatgggttgtggaaaagtcagaagtatgggggaaaattggttaggaagtagcaaggatattttgggataaatctcagagcacttcctttttggatggcttgattgattttgaagaacggatttggccgtggataaattggatttttcaatcgatttaaatgcaatctgaggagtgacaactttgaagagggtattgttttttataacaccacctactcaccttttgttttcacttgttaatgtggttaacaatttttatgtgtttacaccaagttgtaattgtaaaacccgcaacccttgatcatttcacgcccgattcccgattaggtaaaccatttccgcagctttaagttggcaaacttctataataaacttgcccggcaaatatatttaacgaaacttccagttttcacttgtgaccgcagaagctacaatcacatttccccccttcaatatacatcactgcacttgaacacaagccaagttaaagtttttggtggaggaacaagtaaatttcccaagaatgttgggagcgtataaccaagttaacattgtgcttgggtgtaaatgggccgaaacggaacaagtcgtatattaaccaaactaactatataagcatgtacttcctcagcttcctgtcagagtacagtcaaacttttgagactaaatacgttatatgttcgttaacacagtaaatgttaaatgttcataaaatacattgtcacaatgtgaatataattcaatgcttgcaaattgtcactccttaaagtcagtttcccacgaagaagccctactgtagtcagttctgaataagttcttgtccggaactgtggttgtgcaggaataggacgaagatggcagcggttgtttgtgggcgagagtacttcaagttaacctctaattgccattgccccaagtgcaccgagcggcaatatgctgctcatttgtgtgcccctccgttggccatccagtccatgcgaccgcactgtgccccttccacaggctaatcaaatgttacatgcaacgttggagcagtttttattgtacttcgccgccgggcagcaaacagtagtagcaacagcggatcccttcagtaaccacccatcagacccttcaaacgccccgtcacatacttatacctttttctatatatagagggagaatggaacctgaggttgtcatttggccgcctttgttgagggcagagtgtgtttgtgtgtgtgttttaaccccattgatctgatgatgactagcccaaaggcaatcctggcccttcagcgagattctaacaattggttatgcttgctactaagggtatattaaattattattattaagatgtaactattgccccaaatatcaaataaatattaggcatgaggaattaaagtaatgtttaattttctaatctatcttctaacaaattttaatgtgtgattatgaaatgattgaaatgaaaataatgactttgtttacagcacatatttttaacgatttttatacatttcagcacaataaaaagtcaaattttttcagaacgttttcaaagctaataaatttttttccaaattagggtatcctaacttcattttccctaaataaattgcatcccctttgtgcttttgtgtccccttaatgcatatatgtatgtacgtaaaccttaactttatttacgtgcttgattagaagtagggagctagaccagcccgttggggtctctcagttttgtgttgtttagcgacgctatcaatctgatgttcccacatgccccatagccccgggccagtgcgccacgcccctcgattggccccaaaaaccccgccctaaagccatgttaataccctttggcgtcactgttatgagtcggcgagagtgggcaggttttccttatcattgtgcaagcgaaaacttaattgaacggcatttgacatagtttaaggcgatggcaccataaacattgtacccacatttgcccctttcggattagatggaaaattgactttgttgccgttcggaaaattagtttcacttgtgaattgcgcatcatttggcgacggcattacacatcgtgtgacatcgaaacccagaaaaaagcccagggcataaagctacgccagattatgctgcatgtcgagaaggagatgactcccaatctcgtgtcccatgttcctgctccccaattcccggattcctctgcgagccaaatgtcacgccaaaccatgcaacggcaacaaatgcaacaacttcagcggttcaagctgctttccactgattgcgaaaatcatgccgacaagaaaaaacttcgagggtcttggaagtagactttgggatacccctttggtaacttcggactttatagaaaccaattgtaacgttgcacattatatttgaaatacttagtatctcacaaaggttaggaggattaattttaacacaatggtagatttacgaacttttctgaaaagtccttatactttcctgcactgttgcataccctataccaaaaagagttgccagaatgtggcatgtgacagggcgctgaagaagagcttgagctcccccctaccaaccaaccatccaatggttcccacttctgcagctgcatctgcaaccaactgcagtcgccgggtctcgaaagcttcgcaatttgcaatccacagcagcagggacccgcatcttccatctcccatccagagtgaaattttgtcaatgcatctggatgtggcttagggttatcacggagtcacggagtgggaggagtcaggcattgagttatgagtcgcagcagtgaagtaaattagagaaggcaacgaaggagtttcgaatatttccagccaaaggatcagctgcagagctgtgggcaatagatatagatacatgcatgttgcaaccggaattaggtagtcaaaggttcatccggttcatgaagagatgagccgctggaggagccaatttgatgactagcctggattttatggagttaacttcggcagcttaacctaaaagagagactattttagtaggaaaaggagtttatgttttacaggataatgctttcagcaggagacggatatttggaaagttagaacagctgcagcgaacacttactgcgattagaaagtacaattcagcagggttaatcctgggaattgtacaacaacttgtgtaaaatatgttagactttaaaggaaggctttaaacattttacacctatacgcaaacctatgcttctgggccatccggtgtggcattgtcataatttagctcacctataatttgatttatattcgatcataaattaaataacttcgtgcgcaaatgtgcatgttcatttggattacatttggcacatttgcagttgatgcacgcgcctaatggtaattaattaggcatttaatttaattatgagtgcaaattgcgcacaggtcacagcatccgctaatttctggttaaatgcaatggaagtgattatggctcggcaaatgttttgttcaccgctctggggctttaaaatgtaaaccaaaacttccacaatttcaatacataatttacacctgcgcgtattgtttaaaattctgagggggcggagtgctgtttcgcattaaagtgaatgatatgaatttcaatttgcggaaaggaaactcacggatggcgattccattatgtatgtatgtacatcccagattccgtatgcactcattccaagtgacaaacttggcaaacttgggcaatttccgctccacggaaatgtgcacaatttaattttggcctgcggtggcaggggtttgctcattttttcccccgtttttctttttcttcaaggaacatcttttggtctagccgagcagaagcttagttaatatcttcatctgcgtatctctccgcggagttgataattttctgcttgagtgtgttgcagacttccccacagttgctgttgcttttaattagaattagcaactcgcttgtcgtggccacaaaaatggtatgttgtatgtactcacacatgactgccattcagtttggaacccaaagtgagcaagaagtttccatatacagctccccctttctgggcttaagataatttttcagccgtgaaaacataaattcaagttgtttttattaccacacgcacattcacgcacgtatttctcctttcctcctttatccccccgaaataaactttgtatatccaaaattttcttggaatattaacaacactcgtggctttgatttatcgcgataagcggatgttgttgtttgccgttgcttcccattgtttgtggggcgtggggcggtgggtggtttatggtgggtggtgctgctgagattttgattttgtcaggccccatatatatgcagattgattttggggctttaattaagttatctagtttggcattttgataaatgctctcgacgcttcgttacgccgggtaattgaaagtgaaggctaaatgattttggccattaggaaggttgcgcttctggcaagggtaaaccgaaacttaaaatcgagattctattttaaggttaactaagtttaatgcagttaactatttgtataaaaattgaattgaatgtaagataaagagaatatgcagtgccacccacaagacccaagttggacgcactatttaagcacccgcccaaaatgacagacccataaattaattaagagtcggaaacagataaaaatatggtgcaaagaagacgaagcagccgacaaaaaaaaaagaaaagaaacagatatgaaaagaggcagacaaacaaattacacatgcgactggtggccgcgacagtttggctgacaataattaaagcaactacacacagccgccaatagcaacaacaaacagctgcacgcaaacaccagcggcatcctcaaacatcctccactctctcctcggaacaaagatgatctatatatgaatgatgtggatgcacctacatacatacgtacatatatatatgtgtatatgtatgtgcagtttgaagggcggcaggcggatgcagcacgcaggcatcatgcaactccatgcggcaattatgtgaatgcaacgcacacaaattgaaaaagtaaaccaactgaatcagcagacagtgtggcctctttaaaacgaactaagcgtttagagttgtagtgtaaagtaaccaggcatggataaaaaataattgtaaagctttaaaacagttgttctttattcatactaaatacaatatcattttatttcattctcacaaaatggatatttctattttttaagtgtagaagaagtaacactgttaagtaagccgaataactgcttttctgaaattcccccatattctttatacttcaaactcttggtgatcataatcttcatacatgacaactaacacccttgccagctttaattgttaaacaaatattcataaaaaaaacaagaaagagagagagagagagagagcacaattaaaggccaaacatttacttggttttattactgccgacctccgaggtcgtcggttactttatcttctttttcggggcaaagttgggcgaattctgttgtaaggggaagggggaggagggtgaagaggtttcataaatatatgctcatgagatgaccgccacttaaattgttttcttagccatgcaagtgggaaagtttttggacgagaaaagttctcatccaattagcgaagataattgcagttgtcaaaaaaagcagaacaaatttctgaaattaaaggcggtctaattattaaagaaaataaagaccatgagaaaaaatgtgcagccttttttttagtaaaattggcaattttgtcagtatttttttcattttaaacacatttttatataatttacgtaacttcgctcagctattgaaaactgttttatatcaaagctaaaataatagccctattatttatgagagcctctttgttgtttaaataaatttccgtttttattatgcaaatatttggcatatttgtgggcttaaattgaacgatacaaaacgctcaagtctctgtttgtctagcgcataacaaataattccccctagttaagccagttaaatgcttttaaagtgattttacccaagcagtctagagtgttgcacaactttgcctggacaaaaacaataaaagccaagccaaaagtcatatgtcagaaaggctaattaaaggtgacagcagcgatctgatgcttgttcataacaaatgtatctcaaacattgttcaattgcaatctggttttattttgccatcaaaagttcaatggcacagctctataaatgtgcacttgattaatcattgccattttcgtttctctatctccttgcagttaaacccgaaaacggatcttgaaattatggtaagttaataagcctaattggacaacaactttacatggaaattagcagtacacggagcctatcccctgggtgaaataaatcataatttatgctaggagaaaagaaaattgtacactcctcgctatgtataatttatgcacaacttttaaaactggaattgtgcggtttttcgggcgaggctggcgctttgagctcttaatgtggaatgagtaatgttaaaatgtaaccaggacaatggcagccaagattgcgccaaagggagttgccaccgaatctccatcgccagcttccatcttccatgctccatctaatgcaatttatattcgacacttggctcgcctgttgcgaactgggtcaaaacatgtgaagagccccacttgctcctgttgtcgtagttgtgccactggattttatcatcctattccggctggggctttaaattgtccatgggctcgtgcaacccctgttcgtttgattgaatttcaattttcaattttaatacttcgaccagagcaggagtcgtaaagtttgccattgatttcggactctttccaggtcatttgtcccggaaagcttagcctcagctcgggctcaattagtttgatggcgcttcttcctttttggttgctttggcttggctggccggccaaaaagttttcattaatgtaaaacactttacgcactcattagagtcatttgtttgtgacatctctatctcgcattccgtttccccggtccggtctgtggatgataaatgtgtccataatgcggcctaattgcggcatcattagaggcgcctttcggccctgattgccactcctacgaacatactcgaactggattggtacactgggggaaaataaattagtggcaaaagtaatggtgatttctatgtggagctatttgtgaaaggaacttcggtctattgatttaaagctacattagattgtttttgtgctgtgatttaatttcctggcaattttttttctcgaagtgttgggcaggcaaattgagtacttgaagtggacaaacggacttgacttaagcttacatatttcggcagactattggtatccaggcggctgtcatgttggattggcaacaaagcaaatcaaatttaatgataaactcgaatgaaagcacatgtcttttccgcccgagatgatatctgccatctatgccatccccccttatctatctcactctctagaatcgggtctttatatccgtgttggcgtaaacaacaacaacgggggcacataggaatgactaatttaatgcgtcgagtttggcgttgtgtaacgttacttatacgcaccgtgagcgccgggaccttttggcattttgcaaagttaacgaagcgaacgaagcaaacacgaccagacatatacaaaaacaacagcagcaacaaggacgagaaggggaaactgtgaccataatatactgaattttatttatagcataatttcaggtgtcgcgcacacacgacaaagtgttggaaaaaatgctcaaattaaagaacttaacttagcttaacttagtttagctgtaaaatttcgtgtttatttcgcgtctcttcaatttgactttcagcccatcctttgtgtgtataaaaggagctggccggtgggaaactttaagggtcttcacctggttcgcatccaattccaaatgaaagttttggagtaatttgatcagggccactttaattaccaactttgcaaagttctgtcctgtaattacgatgagaaaaatattgtctgaacattgctaaaataatttgaatcctatacgtacccacacactgcgatcccccaatgccaaatcctataaaaacattgctctttgtcttgtcttcacattggcccacatcgttggcagtttgcagaaatcgaagtggcttgtatttcataggctcactgaagtatttttcatctcggtgcatagccagtagaggcaccatcaaagtctttccctcatcaattgtgaattttgaattgggtagcgaataacttttgcggcaaacacgttcaataatgggtagaggtggatatttgcgaagagtttctgtaaaattgttagacagatgtcaaaatcactcaaacatttctaaaaattaaacatacctttcaagcacatgtccatatacctaagaccattaagctcttcaaatttgagctgaccattttcattgcttagctcctttatttccgctctcagtttttccactattaaaggttcttgcaggatttccaagagagtgaaggttacagttgaagctactgcatctagagatactttcaagagatcctcggcaactttggccaagcgtttgatggacaacagtttgtctgcatctagaaataacgaattagtacagcttttcacaatgcaaacttcaaaacttaccattaatcggttctagttgccatttatcgccgctaacttcgttgccatttctaaatctgactagtagttgtagaatatctttacgtatcagtccatgatcttctcgtagttcaacgctttgtttaatgagatctcttaagcggtaggtatatgaagatttctgcggcaggcgacccaaagtgctgaagttagaatggaaatgtaggaatgcttcaagttggaattcccattatgtgtacttacaaggattgtatcgaggcctgactatggctcaggtagctggtcaagatatgatcctcgtgctcaaagttattaatgtccaagccgtaaatcagattggcaattatgttgacggaataactaagagggaaaagaatattaacaccgtttatgccgagaagacttgtgcctcttcttacactctgagtttttgctggatatccacttcctgtggacatccttggccttgcctgtccagcaaatggtgaattaaatgatcacccactttctggacctgcccgaacatctcggacaatcgtttggtgccaaacatgggcgccagtttctccagcaaattgaacctgcgataacccgagatatagtcccacttcagttcgctgaagtgtccatttgattgctgcagaatcgtctgggctagctccacatttcgcaccagaaggacaggcctgaagaagcagtagatgcccagaagccgatccttgcccgactggtaggcctcacagatggcctccacgtgtcggaactcccgtctgtaggccttttgcaggaaactccacgtaatgccggccttttccgaggggaatcccctgcgtcgccagtggctgtaaatgtgccgcaccgagaggaataccgccgaatatagcagaataggcaacagcagccacattatgttgatgatgttgcgacttcgaagtgccctgacagactgttgcctgaagtctggaaaactaaagccgattctctgaagacgtctgccccgatgcagataattactgtgagttggcagcccctgtgcggatgatagcgataatgataatggtattgataatgatgaagatgccaaacgaaatcgaaagtcgcgatcgaatcaccgctcttctcgtctggcaactggcaacaactgccagtcaatcttgtctgaccaaaataacaaaaccgaaattcgaacagaatcgggaggaaaaaatcgaaaaaaaaaattccgggcatactatcacatctcacattcgccttcagttatctccctgtttctctttatggctgttctgagcggcctgatagtaatttatacagcccctgggctgtaccatgttattatcaaagtctggagcaagtttttgtacccaaaaaatacccattatgcgaaggtatctatcaggctattagctcaacatgatagatatattgacatctgtcaaataattcaaaaattctaagcaaactacaagacaaggcgctgcacttaaaaacattttagcaaatgaaatgtgttttaaatactcatcaaattaatgggcattaaccagtccaaactacatacttgtggtcattctttggttcctaagttgaagatgcagctatctgcattacttttgtcgttttacgttcccatctgacaaatgtattctgatttattatatctgttgataagaatatttactattttaaaatcgcaacgtcatcggcgtcgcttcaatggatttcgatgggaagcattatcaatggatcttagggcaatgatttccaatgcggttacgcatctccgggtggaacaaaagatgagcacctgacaacagattcctcattcgcaaggataggtaacgtgaacttgaagtctttagtaaaagagtgcctaatttatacatgtttatagatatgcaaatccctgacaaatcatggtttttaaaaaaggaaatagtcaatcaatgaaagcccacaagctaaccactcccatggactcacttcccaccgtttattgtttgtaatttaagacttcagttaccacgttgggagccaggctttcataacgattggtgtgtcaatcagtcattaattccattgcgcataacgcagtctctctttttgccatggctttatcgagcagttagagttttagccaggttgcctcgaaagtgtcagtttcaatgcctaaccaagtgaatcaaggcaatttgccatcatccactcacttcactcctcggcgacaaggggaagttgttaatcacgcccattgcatgccaaagttgaaaaaaatgtaaattgtgtaaaaagggtagcaaaaaagaggctaaaatgcattgcagttgctgctgttgtcgcaccggaggcaattttccacagcaatggagcaaagtgggatcctacaggtaaccacttgttgctgctccacataattgacgtggcctgtgggaatttgatttaaatgagcccgtgtatctgctcgcatataaatttatgtatccgacccgaagtcgttctacataatttcccacaactatgttgcagtttgggtcgcaagttcaatgggtgggcaattcgatgggtccttttcaattgagtgtttgccaaaagcaatttcaatatttccttattgggttggcagactccagtcgatggcttttgccaactcatgacagcaacagcttgctgccgtggctcatcagcaacgtggcttgcagcggcatcagccgcagcagcagcaacagtcgcagccgcaacagcagcaagtcatgccacaaattgaatgaagttgccaaatacaagtacgtacaggagggctttttttgtttgaggcaattgaatgacttggcagatcttggaggtgcacaaaatattgcaagaaaataattatttaagcctggcaagaatattctgacgactttttaccaaacgtcacggtgatttcatgcacaatgggcttcaaattaaaggtttaaaatttaaacagaaacatgaatacgcgtaattacagactaaactcgatgaaactatgatttcatcgtttaatagtttatggaaataaattaaatcgttattaacccatccaatatcttccattatattattaaattattgagctcattactttaaaaatcaaccaacctgaactataataaaaaccatcaataagtgcattagcgccatttgaattctgcagaaaaaatgttaagcagcttattcggattttgatttcttactagcttttttgtgaaccttttttattgttgatatattgtcatatccgccccctcaagctcatatttattggcttttagtcatccaagtgaactaatgtttaaaaatgcctgtgattcataatgttcacgtacacgaagtcatgaaacatttgttttacattaagtcataaagcgtttgttttgcattattgccaacagacacgtgtcaattcacttccatttgctgttcgttttcccacaaataaaatctaattattccacgactcgttgaaataaagctgtagtatatatttccccacccaaatacaccggcttgctgtgcgtttttccaccgaattattacgtaaatattgtgtttgccatttcaatttggtcataaatcaaaacttgttccccagagcgcaatgaaatttgagtgagaaccataatgcatgtagagaaatgaagcataaatatacaaaatacattgggaaatctaaacaagagttttgaatatacatttcgtaatgtaaagttacatttctgttttagatatttgttccttcaatgacttagatcatatatttttggtgatcatatatttttttttgttttaagacttttattaattatatctactttcgaaagcgtatttatttcatccaagtgcagatacgacgtaaacgaaacttgttagtcacttgaaggcaatagtctggcgcccctttcaccgcccctctccatcgttttgcgaaaatttccttgaacaatggcaaagctttgtatgacagtttgttgttctcgtcaacggcgaagttcatgaacaaatgctaaaaagcgaacaggaaaatagtatatgctcgcttttatatatttacatgcaaattactcattcagcagatgagtgcaacgggcggggaagatgagatctgcgtttgagtgataaatttgcatgtttatgcgaaaaaatattcggttgttgtgatgaaaattttccgtttttcatgtgttagcaacgcagggaatgtagaaactcgcgatttgcgaccacgtcaacttatctccatcgtctgcgttcgaaattgaagattggcttccagcgaagcagaagaatgatgagatatgtcatcagaatgaggcgtgtaaatttgggttttaataacaaattcaatttgacttgaagcagtttttgatccacatacgtgcgcactgcgcagcaatagcgataattgcttgtcctcgggaaaaaggaaaggagccagcaaaatgagaggtcaggcgagacgagaggctttgtgcattttaattgaatttttccccgcattttcctgctactcatgctagccgctatatgtaggtatatgtatatgttgaattattttgtttgccgccgaccgtcacagaaaaaattaaatcacagcacgtttgctcttacgcgctgccactcctgcgcggatgcacttgagtgggtttccataaagcgcaggtcaggggaaaacaaactggaaacgaatcagaaattaacataaaggcctcaaagccaaccaaccaacctgcatctgttgctcatttctttgttgttccattttccgtttttttttaagctgggcattgttaggcagccacgcccaccgccccgctaacggtttcaattgtagtacatgcacggcaatttgtttgatttctctctgactctgctgacatgtccaacattttcactgacctgtcccacgatgaaaagccttggagatgtgtgggattttccagccatctccagcacgcagaggaaaatcatgtcgattcttactttttccctataattccaagttttacatcgctggtttctagagaaagccgtttctggtgcttaataatctattagaaatttttactaattcttatgttttttgcctgctttccatttttccggtgtaggcgtctattgacatctaaaattacattttggccatacaaatcctcgcaatgccttgccccacccacctttgatttatttcgtttatttcttatgcctgtcaatttcaaacatttgtcaactgacacaaataaagtgaaatatgaaattttgtgacagttcttcttcaccaaaaatcccccggggatttggttagattccctcgcttgacctgcaaatgatttttgatattttaaccgagttttgtttttggttttaagaccgtttcatttattggttcgttttatattagctcaaactgtaagtaaagcttatgttgccattttcatttatttatgccagcctaagctgtactatttttcccacatgaaaatttgaattcatatcaacaatttctcttacccattttccacaaattaaaatgaattgggcaatttgtatgggcatatacatatagtatgattgccataaataatagattgcttttatttttcttcctttctcatgttggtttttgccgattattagcttaaagtagacacgaggctattaataaaatccgaaatcatggcaaacgggtagaacgaaaattacgcatacgccgcgtggtacgatacaaacttgacattgaacttgccgctttccgttcgatattccgaaggccattcgaggattggtggcgacagttgggggtgacattaaatattcatttggccgccggctgccttgacaacaataaaaagtggccccaacagggctgagaaaagatatggcgaaaaagggacaatatttttttaattgtttgaccaaaatgttcgatatacatgcatagaccgaacgtcactctgctcaccagggatgtaagatatcttttggggtggtttcctagggacggtgatgggtggtcgtaatgaagccacataaatctcagcactaaatatatttgccaagttcggggagctggggaagtgaggcaattaatcttttgctggaagatatataaaagtttgcgaacagcaaccgacaaaaatctatgagctgctgaaaaagaaaataatttgttgtacaataggtttaagggtactattatttgtgcaaataaaaaaaatattaaaatttggaacaaatcaacaaattttattttatttgtttttgttaagtatatactaagcattttcacaaatcccaataaaagaactgttattataagaacttatttaaaaaaaaatatatcatgttgctaatattacgcctctgactgtagctgaaaacttttttttggccagcaggccagaacacgtaaaaaaacactcaagggaggaaagtcgtttgcctttggggaaaacgggcaggggacatcgtcgggccagaaaagtaatagcacaataaatgtgcatcaggcagccagaaatcaccgcagttaggaggctccgctttcccccgtgcgtgtaaattatagataaccgtgttaatgttgcagtgccactcctcctttgccccgcccccacccgaaatgattctttgaacggcgacagaacccaaacaaacaaagttgcctgcgcaaagtttttggccctggctgccagaagttggccgaaagtgtgccaaagagcttcggcggatgcgcgatacatttccacagcaacttcctgtgtgtcctggacgaaaatttcgccatcctccctgttgaagtgtaaggagctttcttagttcctccctccaatttgttgattattatttattggagctgccgtcggttgggccattgacaactttaaaacgcgttcgagtttatcactttcatttttagcacttaccgtgcagtttccactgccatccgctgtattttgggaaaattagcaatttaaataatttaattacgtcgtgacctgcaatttgtggcgctaattaaaacgtgccaatgtccacgtgcccggactagcttttctggtatttgagttagagaagctaacgaaatttgaacgctccatattcattagttatgcgctttgcctccgaatttgtttgcctgtaagtacacgtagattttgtctaaaagtttttttaaaggtatttgcataggacgtgagctctttgaaatgtaaattcctccacctgttcatgcaaatgtgtcattttgtgtaggagttctaattggtttcggattttggtttttattagctcaaatttgcctgtcacagtggaaaatctgcggaaaatgtagaagttggattttgtatttgaatgtatttttcacctaattacccacgttgttcaaaacaaaactgttataacctcttttgcctgcaaatattcacttaacacccggcgattaaaactgaatgagcaattactcacgttgtcaattgtatttaaccatttttgaacttgctaagtaaatgaaatttggcaaattgttcattgagcataaatttgtgtattatattgtttgtttacgatttgagtttctggagcggaaattgattgtgtttaatttccagcacagcgaccacaatgaaaatgtacatatatatttttttgtttttttttttaacttggcagcaattgcagaagggcaacaaagtaaataaaaaattagagaaccagagaatccgaaactgaaactcgtgttgcgactgggaattgttttacgaggtatttcgtgggcttcgagggtatatatgtatgttgtttttgcttccatttggatattcatatcatagattaaaaatacacttgttttgatctattcacttcatgcggtgaaattttttattataattagattattgtgttgtattttcttgcaagaaatgcagatacctatcgagtatatatttctaattgggaacggggtatcttatagtcgcattttaaatacaaggtccaactgtttttattgtcggttgccaactttgcgaggtggcggaaaatgggaaaagagaattgcattaactccacttgcagcgaaaaccgcagccgaaaagcttttgccacagaaatctaatttagcactctcgctcttctctttttccaactagatgtcgcatcaactgcagcagacacgccgccgtttgggctccgttagcgattcggcgccaccatcggagtccagtgagggcacaggctcctccctggagccacgggacgagctgattctccatccggactggtcggcccactcgcattcgtcggcacagaggagcagcgcccatggaaccacatcgctgtacaatgcctcggatatcgatgcggataccatcagcacggacaccacgagcaacacaaatctatcggactacgaacgtggtcaggtggagagtttcttcggcggattgggcacagagatattcgtgagcggcgctttggccaatctctacgagggaaccggaaacgatggcgactggcgtttggtgttcaccggcataccggtgatactgcacgacaagggaaactccaaggccagagccatacccagagtgacgctggttctggcggagaggggctcctgcttcgccctgtggtcggatcggattgataacctgtcgaactatcggatcgcgggtccctcgttccacacgatgtgccggtccagcaatcatcagcagatgattggcttcagcttcgattccacggatgcggcacgcgaattgtggcagcacgtggagcgtttggtcagcaatccagagaatgaggctctaaccgtggccggaacccgcaagccgaagaaacagaagcgcgtcaagccggctcccttgccaccgaagtcccagatttcgcatccatgccaattccaccacgtgaccagtgtggtcaaggaggacagcgaacggtactacagcatgcaggccttcggaccccccaatccccagcagcatcgttgagtagggtcgggcgcgtggatctggaacacgagcgccctatggtggcagaactgaatctgcctcgaagccacaacccaacacaaccacgaagaaatccaggaaaaaccaacccttagttcgtatggctagttatagatccatttgttataggcctaagttatgccaatgtgcgatccgagtgcggaactcggccaacacatttatctgtgatacgatttaggcgtctttactttagagagggatactgataacacaatttgataaagaacatttttaaacgaagaacatagcaaatgaagcgagagtttttgcaagttattaaaacatattaagcgattaacgtttgtcgataagcaagttttttgtaaaaccttttctaatatcacacatatacccttatgcataattatattcgtaccatatagtcctgatatctatcgagtaatctttatgtccacactcgaaggcactgcgaatgattttgatgcctgaaaagcttgctttcctatcggattattgactaagcccagacaaagatacaaaaacagttttttgaaatctatgtatcatataacacacataaatatatatgctatattacacctatctatatattatatatagctctaagcattacatcatagccacttgtctgtatgaacttcatattttgcctgtgcaaaacaatcgcgagaatcaaataaagctgacaaagagagccaattaaatgtgaaaa

SEQ ID NO: 24 - protein, 281 aa, Drosophila melanogaster
MMSHQLQQTRRRLGSVSDSAPPSESSEGTGSSLEPRDELILHPDWSAHSHSSAQRSSAHGTTSLYNASDIDADTISTDTTSNTNLSDYERGQVESFFGGLGTEIFVSGALANLYEGTGNDGDWRLVFTGIPVILHDKGNSKARAIPRVTLVLAERGSCFALWSDRIDNLSNYRIAGPSFHTMCRSSNHQQMIGFSFDSTDAARELWQHVERLVSNPENEALTVAGTRKPKKQKRVKPAPLPPKSQISHPCQFHHVTSVVKEDSERYYSMQAFGPPNPQQHR

SEQ ID NO: 25 - DNA, 2040 bp, Drosophila melanogaster
attgactacttggcaggagagcaagtgcccaacatttgttgattcttttgaaattccggcctctatggttgggagatcatcgggaaaaatggaaagatcagtggacgccagcatgggaaagaactgccgagcctgcgccgaacactcatccatactggtggaccttttctccaaggagatctctgatccccccatttgggaaatgttgaactcaattctgccggagatctgtcgcgtgaaacgggatgaaatgccacaaaagatctgtcctacctgcctggtggccgctcaaaatgcctttcacttccgtcacaagtgtgagcagagttttcagttcttttcccagctcctccagctcgataaatcaaactcaaatctgagtagatcccattgcagaagaggtactatgaacccattaatacccttcgagatagttggttgcgaggatccattggacacaaatgtaaccaaattggacgctaatcggcctgatgtaaaaactgatatcgatgagccaaccgatggaaaggcaactaatggtcaggagagtgaaccattgcaagaagtttttgaaagtaggtctattcgatgtcatccactttcacaagaacttccattgtactgctaaaatctattctagacttgcccgttatatgctaaaatttaaatttattttttagtaacaatgaacgatattaaaacggaagatgaagtatccattcaggagacatttgaagatgcctttgatgaagaaaatgataataacaatactgatagcgaaagggaggattcagaccaatggacagtgggctcgactgaagaccaagatgaaccctggattcccggcggcggagggcgccaaacggttggcggcaataatcaatcgcttctgtgcacagagtgtggagtgagttactcgactcaaaaggcgttggcaaggcacgttgccaagcacaaggagcaaggtgatacacaaaagccgcacctctgcgatttctgcggtcggggatttcgtaccaatgcccagctaacgacccatagacgccgtcatactggagagcgtccttttaaatgccccctctgcccgaaagcttatacgcacggtccgactctgaagtcgcatatgcacacccacgacgaggaaaagggtcacaaatgtccacagtgcgacaaaaccttttacacgagaggcaatcttagggcccatatacagaggcacactggcgaacgaccctataagtgtcccgactgcccacaaacctttgccaaaaactctggccttaagttgcatagccgtctgcacaaggaagagcgaccctttaaatgtgagctctgcggcaagggattcgtacagaaccagcatttgattacccatttgcgggtccacaacggggatcgccagttcaagtgccccgactgcgacaagtcgttcttcgagaaatcgaacatgatgaaacatcagcgaacccattcgggtataaagccatttaaatgtgaggagtgcggccaagccttttcccacaaccatcaccttaagagtcatctacgcatccatacaggcgaaaagccctacaagtgcgaccagtgcggcaagggtttcagtgcgaatcagtcactgatgaagcataccctttggcacgtggacaataatgatcggccatttaaatgttctcagtgtcccaaagcctatgacactcagcagagcttacggggtcacgagaagacgcacaaaaacccggatgagccaaaaacgctgcaccaatgcccgcactgcgacgtcaggtttgctttaaaaaagaccctggataagcatatcacaagccacaagattcgaccccacccatgcccgcaatgtccagagggatttttctcccagaagagcttaaaaaagcacttgcgacttcacaacctaaagaaataatataagattatcctgtagccccagcataagaccattagttataataagtgttaagtagatataactacagacttcgtgtaaggaaatcattaaatttgaacaatctgatgttaccaaaa

SEQ ID NO: 26 - protein, 583 aa, Drosophila melanogaster
MVGRSSGKMERSVDASMGKNCRACAEHSSILVDLFSKEISDPPIWEMLNSILPEICRVKRDEMPQKICPTCLVAAQNAFHFRHKCEQSFQFFSQLLQLDKSNSNLSRSHCRRGTMNPLIPFEIVGCEDPLDTNVTKLDANRPDVKTDIDEPTDGKATNGQESEPLQEVFEITMNDIKTEDEVSIQETFEDAFDEENDNNNTDSEREDSDQWTVGSTEDQDEPWIPGGGGRQTVGGNNQSLLCTECGVSYSTQKALARHVAKHKEQGDTQKPHLCDFCGRGFRTNAQLTTHRRRHTGERPFKCPLCPKAYTHGPTLKSHMHTHDEEKGHKCPQCDKTFYTRGNLRAHIQRHTGERPYKCPDCPQTFAKNSGLKLHSRLHKEERPFKCELCGKGFVQNQHLITHLRVHNGDRQFKCPDCDKSFFEKSNMMKHQRTHSGIKPFKCEECGQAFSHNHHLKSHLRIHTGEKPYKCDQCGKGFSANQSLMKHTLWHVDNNDRPFKCSQCPKAYDTQQSLRGHEKTHKNPDEPKTLHQCPHCDVRFALKKTLDKHITSHKIRPHPCPQCPEGFFSQKSLKKHLRLHNLKK

SEQ ID NO: 27 - DNA, 26587 bp, Drosophila melanogaster
catttggtagtcacgacttctaaaatatcgatacgttggaattgtgtaaattttccacatccctgggaataatcgagttaaattaaaataacatggcgttaaggtcggattacgaggtgagcaaaaataaagcctggattacgatgaaaactaagttagttaagtgagaaaatggttaagtttaaactgttgttagaccatgacgagggaaccaaaaagaaccagggccaaaacaaattggccaagtgatacgctgagcgggcgttgtttttagtgggaaaaatcgaagcccgagtgcgctgtgtgggtgtgtgcgtgtatctgtgttgtgtacattgcttttggtgttgttcttgctgctgctgctgctactactatttgttttgttgctggtgaaaaagcgagaagcaacgacaacaacaacaaagccgaggcgacgcccaacgaagtttactaatttgtttgcgggctttcggtaactgcaaacggaatcgaatgtgaaacggggcgcagttactaatcctattggatctggatgggcctatatccgcttacctgctgatctgtaaaaatagcctgggcttagagcctggcttttgacttttttctcgaatttgtattcgctctccctttctcttgctctctctctctctctctgcctctctgtctctctctctctcgctttccaggtgcgcttagctggcatgcgcaatttgcatttccaggccgaccagtttcccaaattttccactttcccggcgcgaaagcttttcgcttttccgtgcttggaaatcttccagttttcggcttacataaccggtactgctgccgcccctcccgaaccacgccccattccgccgcatctcgcagatttcattattggaatctcgagctctagaacgaaactaccctgcataacacgtttatttttccattttccgtgctttccctccttccggaattggtgtcattgggccgagtagtgcgctgctaattacacacactggcacattagcgtaaatcgacgtacttcttaccgtacttttttctcagtacgtagcccttactttcccttccctaccccctcaccattcgattagttactaaatgccccaccgatgacgccacttaattaccccgcagaaggtaatgagttcttcgccagggttgttgtttccacccgggctttcggttctgttcctagggctagaccaccaattctaagtccgtattgccagctctattgattttggggcttgtctaagggcaggtcacacacacgcacgcacccacacacatactggttcgacggcccgaaagtatgcaaaactatagagcaagcggtctgaatccactcgcaacaaacagtgggtccagatattatttgtaacgggaaaacttgaaaagaacgcttaagacctcacttagacttgaaagtgtcttgtagaatatatttagatattattatataattattataatatatattatattgtgcatatttgtattgttataaaattaagtatgtaattccaaaattacgtctttattagtattgtagtggtatgcatattttaagaatcaaaataagttacgcaaattattttaagtttaaaaacatttgtggttgggtttattgggttgggtttcatacaattaattttataaaatatgacgcatttcccaacggattttcaagggcaaattctgatgataatattgttggtgtagaatacaacgttgcataattattataattcaatctgccggactacgacatcttatatcttaacccagtgtgctcagtggaaattctattatgatttcacgcacaaatccgcgtaaagctgagttatgtacgagtatatctcacatccccccaccagcgttgtggcttcgttttgtatgctgactcatgcgctttcaattgaagtcaatttaagaaagcacatcaaaaatcatgaaactacaatctgacgatgctctaagaacgcgataatgaagttcccttcctctcaatgtgcgttccataagtaaatgatttggaattaagggccagccaaaacgagaactagttggtatatgtatgtatgtatgcatctacccgtttatcagtcgaaaaatgcagataaagcaattaagagtttatggagaggacggcaaataagctgaataatgtgcttccaacgtggtaatggcaggttctaaatgctaacacccaggatttgaatactatcagcagttatcagcgttgacatgtagtacacacacctatactatatattaaccagatattttgtgcacccgaatagacgggccccttccctttttgaccagttttacccggctcggagattttaggttcgcgttaactacttaacagattgccgatggcagtaaaagcgacagtgataataattacaactggaaaataccagaaaaccgtccgacagaggtggtgacttgctttcggcaatcaaagcgtggcagcaaaacaatattggccgttttaattcaattacgcgccaataaaaatctaatcaactgacaatggcaaaccgtttgaatagatcttgttggaaaaagccatctacgctatgtgggcatcatcaattggcggccataatcgcaagatgtggaaattatcacctcgcccattgactgtttgctgtcacatccagcacacagattgcattcgacaaggacttcgatttgtttcgctgcggtgtgatatttggcacatgcccagtttgcgtcaatgggtagggtcttaattactaacgattgcataacccgctattaggggtctgggcctccagtttcccaggtatcggtatctgtatctgtgcctttgcgctatatttacctttcgtctgcttatcagataacactcgctcgaccaacacttgtagattaagttctagagcggtacgttgatttattttcgttttcgtttgttttcgagttggtctccagcttgtaggtctctcaaggtccatcgatcattacccttcaggggtggcttagttccgaaggggtagtttattgtccagctacctgaagtagctgagccggagctcaacaatggctcaattgttcctgttcgccaccggttcaaacgagtttcgggcggtaagacgagatttgtgaatctccagaactctgaactcgtcttgtgtcacgcacttaatattgtctgaacgacaacaattaccgcaattaccgcgaacgcattgtgggaggaagtaaacgagctgggtcgagattaagccggctccactgggcaatctgtaatgcatagctaaggaaatgacataactttcgaatattactcggattcaattggccggtaaaatgggaaggcataacaaatgaataaacacaaaaaacagcgggcgatccaactattctagatcgagtaaataaatatataacccgcaagaactcgctaaaatcggatttggctgccacttgtccgtgggatttcttttggcactggagatccataaaaaaatagctacatatacctgcctgccataaatgttaaaatcttggcatttcgaaacgaaaatggaatggaaaatgttttccaaatgatgcaaacaattgaaagattgttcgaattctcgcagaagatacatacagttgtatatgtagctcaattgtgtgtgaatctgtgcctgtatcttttgattcgcactttgcttgttgcccgacgctccttaaatcgtcataataaatttttatttaatttaatgcctcatatgtgacgacaatatcagcaattgccgccacttgcacacaaactcggcctgtccgtaatttgttttaatttaaatacaatttaatacgcgctgctgacgttgccataaagctacttttgcagtcacgatcgcacaaaaaaaaaaaaaaaataaaaaaagtgcctttttggccaaatgcaaacaaatcgaaataagtagcggacaaatgccaatttggcagtagccgaaaatatccagctatacgaagtcgaatcaaattatcgcaccgctcgataatgagaaataattgtggtatatatgtcgggcaaacaaataaccgtcgacagctgtaattggttttgggttccgccacacttgagctgaactggtttgcgtcgtgagcaggtgaagtgcgtcagaggatggccgatggtaccgacagatagtggatacctgataagacgccactgattcgcaatcgttatatttgggtacggttaccgggcaaccttggtgtgcggatctaggcggcattaccgccaggaattcgctgttcagatcccttgtacctattccaactgtcttccaattagacgtgccaacgtgccacaaatcgctggttttgaatgctgccgctcaagtaggttagccagcacactctcaattgaggctgatttagtgccaagcggttccattgagcggtgacgcgtgtcatcccgatgcacccacctagcccactccgaaactctggatcagaagggggttctattgatttgtgggtgtcagcgatataggaagcatatgcttcagcaggcgtgtgatgaacatccccaaaagggtgttgcaatcaatcaatattagatttgtgccgcaacaaccagtagtttttaaagtaatgagtaaataattaatggatcattacataaaagaacagaactgtagaatgtcgttcttttgaaaatgtgtaactatctttgcactccctttcccagcctcaaagccgactaaaatatatctttcacaagatctccactatcagctggcttttatggagatgaagtggcaacttgttcgcggttttagggccttgaagagcacccccaaataaagtggatatctatatgtatatatctaaacgaatgtatatgtattcgctaggagaactggaaaaatcactcagcaatccccgctgcgcgtactcatttggccaacatattggacggcccccctaacccacaacagccccttttgtgtggcttagtttccaggcaatgacaagtgcacacacgcgctgaatgggccatagaaaatgcttgtgctgtactgatggcctggctgctttgcttactttattattatgtatattttaattttgattagaatttattgctccattttcggacgggcagtctccggcgtttcgcattacccaactgaaactcaaagccaagcggtgtctctgtatctgctgtagctgtatctgtatctgtatttgtatatgtatctatgagatgggataaaatgcgatgagatggattaggatgtatccaagatctgcccgcccacaacgatgcagcccagtcagctgctgtctgtccgttcccgcaaaccgtgaaatcggatttacaaggtgggcggtaggtggtgggaagaggcctccattgctctactaaattaaacgtggaataacaattggttttttccggggcatttcattcaatgctgaccgacgcgagatgccagtgactttccttcatcgttgtcgccgtctaaggtttttctcatctttttaactactgtatgagctggatggatggttggtcgcttctttacaatgggaatggcgtaaattagacgagctatgctcgtaaatctattgtcataaacgcctacgaggagcgacgagcaaattgcttcgaatggcatcatagactaactagagccggacttcgacttgggctaggatcgagtttatgcgctgctcgaacgttacttgatcagagaattgagttctgaaactagcggttttctcaatactactgccatttttcaaattttaattggtaacatttaggatttgaagtttttcttctcaattgcaagcttttaaaacttttgtttttatgtaactttaaataattttcgtaacatttcccctgccttggaactcatcacgaatccgtcaccatgcatgaccattgtggtccgtctgccattcatggcgagaaaagaccccccggcggtcatgcgggtggcggggggcacacattttaatcagtgctcaagtacaacggctttatggctcattcgctctcatatcggggcactcgtgatggcagtgattatgctgcactcggattcggactttctgtcgccgtctctgttttttttttttttttttttggttctgccagggcccaggtcatgaacgccattatgcaaccgaatcgagaaccgacgcccactcccatcggcggggggatcgcacttgccaatggcaattagcgagctggccaaagttttcgctgcaggctgccaaaccaacttgcacgcttttccccttttcaaatgcaaagtgcgaatgcaacttctacgaactaaagtggaactttccgagcttgaactcgattgaagcacttggacccccccaaatgtcacataacagattttattattatagctatatataaagcaggaatatatgttttctttattttcgcttcttccttgactacgctgcaagtacaagtattaactagttcttcatttggtatcaaaagcttatttagttccctcgcatcattggcatcttagcaaagtcagtagctagttgactttgacaccacgcaaattcgtaaagtcatcaacgctgctccgcctattgattttgcctaaaagtcataattggcagtggaacagaccttttttgtttaggacactctctgcaaccccaaccgcagtcataatttgtatattgatttttcaggtggttggcattgagtttcccacaaaaaaaaaaatagaagggggacacgtggcaggtgacagaccaaattgactttttccggggaatagaatatcgggaattgactgatcgaagtttggagacgtcacacagaccggttgaccatagacttggctacgcggaacccttgtcagttgaccatttgtcagctgaacgcattgtcgttcgattgtgacgccgctgctctcctttttacataagtaaatgttcacggacgattcacatggatgcatatgaatcaattaaatgggccaccccggccatatctgtgcgaaaagtttagggctttatctatgtatctcaactttcattcctgttgccaagtgtttgtcgtgccattacataagttgatattgtaggccagcgagaattggagaactactggcgtacacaactggccaacacggtcatttgtttatttattttggacccatctctgcgccgccctgtaacatgaagccaagctgatgacccacaaattgagtttgagttcatctggccgggacactccttcagcgtatatcacacgcgattcgataagttgataaaacgtgcacgattccggccagaaatctggatgcccccagtggatcgataggggagtcattcggccaccctccgctccggaaaaccagagactgaaacttttcccgctgctttagctggcacgatgtcttatattgattttccgtgggatttagtgcacgcaaaaaaatgagctagaaattaatcgcgcaccgtacggtgctcaagaggaaatattgctaacaaactgcttcgtttaaattgaaaagttttcatatcagcatatggtacacatgtttggggaataccaattaaaatactaacactatttaatgtgacggtcataggtaatatttcatcttgtacaaatgcaacgctttcaaagtcttttagaacttttcgaatatccgtttggaattattctagtgtagtacttgctggccaagtgcgtatctatgtgatttgccttttgtctctgtgctggcagcattacgtgtaattaaactcgagttacaagggactggaaatagactcaaggtccgaaaaggaaattactcgagtccttaagctctaagccagtcgtggtgtcatttcacccgcaaccccgacacttcgcctataaatgcgttaagtaagaatagcaaaagcttattattgggggtagggacatgctaagtggattcgcatatgaaacctcggattcgtagattgaatatgggctccttaatatgggaatatgattttcataacgtgccacattgattcaccggcttcgggggaggttttctagttgtccccgggggttgaccatctgactgaatgttaaaaacgagtctcggtaattgtcaacacttttggggggatgggtacaactggagtgacgtcatgcaagggctcgaataggcggctgttccgaaatgccaaagttgttggcctgccctttttatcaaacgctttgttttcgttatacaatttatgtagatattcgctctgtcttcctctccctatggcactctctctctctctctctggggatccctctttcgcccttgccacccctcatttctctgcccgctgccccattctccgccgccctcgctctccaactgacacacattccgctgctccgagctgcgcagccaaccccttgcctgcctcacttgtcacactgccatagatttttcggctggaaagctctccaccactgtgcacttttcgcacgagagtctccactcgaaaaaaataagtaccacattttagatttcattttattcattaatttcatttttcatttaataacttatctgaaatactgccggttgtcactaaaatctcaaaaatgtgaatattgaaaacgtttgctttaatatgaagctttattcgcaattctttttttaaagagaagatctttggaattgccgttcgaaatatgctgataagagttcattacctatgaagcacatgcagtaagaagtcttatgttttaaacctatcttttcatatttttgtgacctgatttaatagtagtgacattgaaaggctacacgaaatattcttctttacgattagccttaaaagcgtttgtagcacattcatggttttttttcgccgagtgtatgagagcgttgggctgcggtgtaacatctgctggcgaaagctctctgccgacgtcggcagaacggaatgttctatccgagaatcgagaaagcttaaccactcgcggcgcgccgaaaagtttcagtcgaacgtcgaatccgaactgggaaggtccaactgtgacagcagcagctatctcgtctctttgtcgggtggtacagtacagctctgctcccctgccgcccgcccgccccctcggcgctggtgtgtgcccgctgctctgcttacacaataactgtgcatcgattgagtccagctccagcgagaagagaagcagcccaggactaactctcgttcgacataagaataaaaggatattacgttagcgtacagcagtcgtgtgtgatcagtatttgttgtatttgtctcgttccaacgcgaatcggttctagtgctgaaaacaagttcaatactgctaacggggtagttttctgcgaaagcccccaaaacacaatacgcaacgccaagcgcaaaaattgtgtaatagcacccaaacgtgtaaaaggtagaaaaaaataagaaagaataaaagaaaaaaaaacgaacaaaatgaaaccaagaactttccatgtctgctcaactgcagcgcccaccgactgccccaccacccccctttggggcgtcgagaaaacgacaacgtccttgtacgaaatcgatttttccaaaacttcatgcctggcgtaatggatatatacatttgtaaccatctgaagagagaaacggagatcgaaaagaactgtgtgcccagccattatacctttttcgtttttcccttagggaaaaacgggagatgggcataaagaaaatgcatttttcggacgcatttgacagtgttggagtgatctagagtgttttagtgtgtgtgccatagcgagacgaatatgcagaaataatgtttttcctcctctttgatttggcattcattttggcgttcatggcaagccaaacgcatgtccgtccgtttgtccgtttcctccgcatcgctttcgcctgacgtacttttgtggcaatgaaatcgtttagattcaattgacgcgatttacattttggaatagcagtaatttcctggccaccccacacgaatgagtggatatagcgagccagccacatatatagagcgatttgggtcccccgcctggcgatttcataattccgcacacagcataaaaaaaagaggggcacaggaaaaagtcttggaaaattttcctgccgctcttttcgaacttgcgcccccgacagtttgctcccactgcgctgtttaccgttaagctcgctcactttcgaaattctgtctctcgctttctctcttggcctctccattgccatgtgccgttattcggcatcctggaaactgcagctcgcctgcatttccatacacacactcgcttccattgtccacttccacacaatttcccgtgactccgtggccttccagcggtccacttgctgctccaccgcctcgtccttccagcgcccgcgtatcctgtggattgttgcataagctcgagtcgttttaaccgttttcgcctctattaatcttgcccttttccaaacttttaattttttcatttcagttttatcaagtttttattttttactttgttaatcgtgttttatctgccccaaccgttgtcgtgccttacatttttgtttgttgatcgttttatctgtctcgcctctaataagtttaaacaagaatccgcataatgagtgctcaggtgggtaatcgaaactgacgagctcagaaacattttattcatttacgtatatttttccatcaattgtaatttaccttgaccgcttcgagcatgataaatttaagttaacttttacgaatcagcgttacataacctatccttgtcctcttattaagtagggattcgtataagaaattatattggtctggtaaaaaatatgtatgtcggttttatagagagcaagcaaaacgtgcgaaaattaagcagacaattagctggaaattgttaataatatttaaattaaacactccggcaactgagatcattagcgagctcagctcatctggcgtttcagtctgcggatcacaaaaataataataaaaaaaaaaacaataaacaagtcgggtgaaaatgcatttctaagatactagagatgccagacacgatgtgttatcttgcccagtgaaactggtttttattttctttttcggggttactatgaaggggaaaaaacgagcctagcaaaacagtttcaatttcccagtcgaatgcattgtgttctatcaatccgaatcagacacctcaacgattgagccgcctcaatctggtttgaaaccggttaaaaccaaacttgcactcacctgccggctaatgcaccttcgaataaaagcgatatgtcaacaattcgcccgatttctggcttacacatttcccagatacttttgtatttgcacttttttgcattgattgaacaattagcgcgtcaattcgatgcacagctctttccctccaaatagtcgacatgttgtaaattgatattcaagttcaaatgccaaatggtttgcggcgaaatgtgtgcataccgttttgttctattcggtttagggggggacatttcagctggagcgcagcaacagatacacagatacaattgtatctgttcgtctaattggttcgctggcagctcacagttcgcagttctcagtttgctattttccatttcactggcttatgtaagtttctctgcggctgaccgcccattgtcgtattctgatttatactattttcgcccgatctccatcctggaccccaatcccaataccaaacccatacccctgtttccacatgctgtgccatttggcattgtttcggatcaattgaagcatgaaaagcgcgattaacttgaattaatgtgtatagaaaaatcggaattggcggcattgtgggaaaaccgggcgctttccgcccacaaagtcatggctaacaattgtttactatttcctaggcaaggtagcatgtaagcttaagatagtactatcattaggatatattctaacgcatatcttaactttaatcctcccatcagattgtttagcacttgagagggaatcttagaacgagggaaaccagcgacgcgagataaaagatacgaaagcagatcgatagtcgtttgaacacttgccacagtgcgtaagccgaaaagtagagaaacccttcagtagcaggcctctaggcccgattctctcgattctcgattcgatttatttcatgctgccaaagcggcctcaattgaaccagaaaacccaaaaggccgaaaaacagaaaaaacctgaaaccaaaagcacatacatataatgaaattaaataaatcaagacacgccaggcccgaaaaagcaaagccaaaaaaagcgtaagattctcgaatatgtatagtcgagtatacccgcaagttggatgccatgtgaacgcgacaggtttgcgttctcgctttcccctcgccctctgcattcattagtgtatacatactttcgtctcgagacatacgtatttttaattaatttgatttgatttccttcgacccctcggttttgcatggccaaacaaacagtagactatacgagtatgtttatattgcatatctcttgagttcttttgagtttcgctgacggctgcgctcttcactagcccattttgtttgttttttaataatattcataataataacagtgactcacgacgcactgtagataacgctgctcgatcccgaaaaacgggtcgaattttggctatcgcttgctggaaagcctttctattggaagtctatgtatagcacacgattcatagtcctttggcagcctggccaaagttttccatttccaattggcgctgaatcatcaaaacaaatcgcgtgttgccaggccaacgaaaaaccgcaatgcccgaaacgcctttagttttagctaagagttaatgtatgcatcatatcctatcatattaatgtttacactagtgttgcataagttgatttgtagtgtctctgttcgttcatatcatatttatcatatatatttggttattctttagttatcttatatgctacttgctagatctggtaaagtgaaaaatgaaaataattcctgaaactcaactatgaaataatttataaatataatcttattgcaaatacatatactgatttgtatagtttattttattgtaaagtaaaccagtctgatttattaatacacaatttatcactgtaacagactgaggtttgcattcacgaatatcatttatcactttaccagaggcggaaaatagctctcttatttattataatagccatatactacatacatgcatagtgtacgtcttgcatttgcttatgctcgtttttagttttgttcgatttttgatttttatctcttccccgtttgaaaacgttacttgttcgcccatcatcgacatcatcaatcaaacaccacccaacaaccgacccaccaacaacaacacccaaactgaaaccgaaaccgaacccgaatccaaactcgaaacccaaaccttcatgtgcgtagcatgggagggcggactcttatcgagtcgccacggttatagccaccgatgacgacaatcgcacagccgatggccagtacaaggtaaatcgaattttcctcactcacatcacacaccgccatatacactcgtatctatcatccactctatttatgtttttcatttctaataccgacccctttcgattttaagcgctttactaacccacttctttcccatcgatttcccttttcccggtctataattgcacatattatttattatatttgctagacttgggcatgcttccaatgacattttccgagtgcagttgacatttagaaagcactggcgaaatgtttacagcggctataaatagccataattcgctatgtataacgatggccaataataatgtcataaatatggccatttttgaatatctcggagtttattttcgaatctccattcattaaagaatatattattgttcaaggaaatatggccttgtactaataccaagcagttttttgtcttttgctcgattttaaaagttttccaaatgaacaggagttcaactagttgttgtttttttccatttgtttttccttgattgcatggcaaccccaacaatgacgtcagagagcaaaaaatcactgcccgtgcgtcttgaaaaaaagagaacacttatagacactgttaaagatagaatgccagacactagacagctgctaagactatatatataatataacttttgaatccacatatattttatttagaattctctttcttttccttcttattttttttatttggccaattcaaaggctttcgaggtcagcgaatgcatagtaaatctatatatttttggttgcactgtaggaaaagttacttttcattcatttttttcgtatttaatttttttttagttcctttgttttgtatacgtagcatatgtgtaggaacaaatgtttgtataattgcttgatgttttgttttgtgcacctcaattcatttacgtgctcttctcatttcgatcgggagcgtcatttagcgcgcattttgcatgccttagattgcgattactagagctttacgtatcacagcggtcgttttgaatattctcacgctcgaactcatttcggaatgggttcgcccaagtctataaccacatccccgtgcacaggttcggaaaatcacttgacaagtagtaaatttaagtcgggtaagtagttaacaacgggtaccggtacttaacttatctctaactgacccctaactcttaatggtaaacggaacagttgtacaattttgagggtttcttcagtgcaaacctatcgtaaactcttctctatccacttcctctgtaaccaatcccaaaacacactggtaatattgaatcctgtacgccttttttgaaaggcctaaccaaggcatgaagtaaatcgaattttgtgtcggctaatgggtctcgctgcagtgcatcattaacttccgccactaacgatattatccctctcaactcaacagtcaagacgcaagatgccggccaaagttaataaaaaggagaatttagatgatctcaaacaggagttggatatcgattttcataaaatctctcctgaggaattgtatcagcgctttcagacacatcccgaaaatgtaagtgcagcatttgagtaaatggtatcccattcgacatgtgaacttatacgtttttgatcttccgcagggtctaagtcacgccaaggccaaggaaaacttggagcgcgatggtcccaatgcgctgacgccacccaagcagacgcccgaatgggtgaagttctgtaagaacctgttcggtggcttcgccatgttgctgtggatcggtgctattctctgctttgtggcctattctatccaggccagcaccagcgaggagccggccgacgataatttgtatctgggtattgtactttccgctgtcgtcatcgtgacgggcattttctcatactatcaggtatgtgtccctcaaatctgagcagctaaagatcggcttactaactgtggtgtgtgttccgcaggaatcgaaaagttctaagatcatggaatcgttcaagaacatggtaccccagttcgccaccgtcatccgcgagggcgagaaactcacgctgcgcgctgaggatctcgttctgggcgatgtcgttgaggtgaagttcggcgaccgtatccccgctgatatccgcatcatcgaggcgcgcaacttcaaggtggacaactcctcgctgaccggcgagtcggagccgcagtcccgcggtgccgagttcacccatgagaatccgctggagaccaagaatctggccttcttctccaccaacgccgtcgagggcactgccaagggtgtggtcatcagctgtggcgatcacaccgtcatgggccgcattgctggccttgcctccggtctagacaccggcgagacgcccattgccaaggagatccaccatttcatccaccttattaccggcgtggccgtgttcctgggcgtcaccttcttcgtgattgccttcatcctgggctaccactggctggacgctgtcatctttttgatcggtatcatcgtcgccaacgtgcccgagggtctgctggccaccgtaactgtgtgcctgacccttaccgccaagcgtatggcctcaaagaactgtctggtgaagaatctggaggccgtggagacccttggctccacatcgaccatctgctccgataagaccggcaccctcacccagaaccgaatgacggtcgcccacatgtggttcgataatcagatcatcgaggccgacacaactgaggatcagtcgggtgttcaatacgatagaaccagccctggattcaaggcgctctctcgcattgccactctctgtaaccgtgccgagttcaagggaggccaagatggcgtcccaatcctcaagaaagaagtcagtggagatgcctccgaggctgctctgctcaagtgcatggaactggctctgggcgatgtgatgaacattcgcaagcgtaataagaagattgccgaggtgcccttcaactccaccaacaaataccaagtgtccatccacgaaaccgaggataccaacgatccccgctacttgctcgtaatgaagggagcccccgaacgtatcttggagcgctgctctaccatttttatcaacggcaaggagaaggttctggacgaggagatgaaggaggcgttcaacaatgcctacatggaactcggtggactgggtgagcgcgtgctcggtttctgtgactttatgctgccatccgacaagtatcccaacggctttaagttcaacaccgacgacatcaacttccccatcgataatctgcgtttcgtcggccttatgtccatgattgatcccccacgtgctgccgtgcccgatgccgttgccaagtgccgatcggccggcatcaaggtcatcatggtcaccggcgatcacccgatcactgccaaggccatcgccaagtctgtcggtattatatccgagggcaacgagaccgtcgaggacattgcccagcgcctcaacatacccgtctctgaagtgaatccccgcgaggccaaggccgccgtcgtccatggcgctgagcttcgtgatgtgtccagcgaccagctggatgaaatcctccgctaccacaccgagatcgtcttcgcccgtacctcgccccagcagaaattgatcattgtcgagggttgccagcgcatgggagctattgtggccgtgactggtgatggtgtcaacgattctcccgctctgaagaaagccgatatcggtgttgccatgggtatagccggttccgatgtgtccaagcaggtaagaaatcagattattatgataaaagtgggaccggacaaaaaatatcaccaaaattggccttccattaggcagtaattataattttaaagcagcataaaattaatttgaaaatgagtgtgatatttttttcttgtccacgcattaaccattccatattaacatttaaaaggattttgttgaatacgcgtttaatgtttttagtatgggaaaatacggtataattttcctttctgcatgaactcatgttttcggtttatgacactcctatagtaagtgagagatggttcaatgtggatttgatgttgtttttgcctaccaaaatgcctaaataaattatctaaatgatcctgtgtaggctgctgacatgattttgctggacgacaactttgcctccattgtgactggtgtggaggagggtcgcctgatcttcgacaacctgaaaaagtccatcgcctacaccctgacctccaacattcccgaaatctcgcccttcctggccttcatcctctgcgatataccactgccactgggaaccgtgacgattctttgcatcgatctgggcactgacatggtaagtttagacctctgccccaaacccaagctccatcgaagattaaagttaaagttgctattaagtcagtatcattcgagcaagttatatagttatacaagttgtagcccatcccagttaatagttaagaactagcctttttaacaccaactctgaacgtaaattgtgcggctgactgcactgccgatcagattcctgccatatcactggcctacgagggacccgaggctgacatcatgaagcgccggccgcgcaatccggagatcgataacctagtcaacgagaggtaaacgcgctagcctccgctccgatttagatccagcagctccagctagaaaacaacgcagtgctaggccatcgagtagtttaagtgctcttaatcacgtcacccaactctagctaaccccacagatctaggccaaaatcgaactgaattgaatttatggattgtaaaccgttgctaatgtaactacctgccgtaatccaatacctaggtgccagccatttcattggcctacgagcatgccgaagccgatattatgaagcgtccaccacgtgaccccttcaacgataaattagtgaactcaaggtgccaatcaagtcaatttataccccacactaaaacacacccacacacacacaccacacacacccactcgccaactcactaacctcaacctttaaaaggataaatccagactgaagtaaagaaaagcgcaaatcaagagaaaaaccatataactatagcatatgtcttatgtgtatgtggctggattgtattagaataagttggcctaaacgaaggcagcgtaaacatctaacaaagccgttgactcgtttatggcttactaactacccaactaactcttaagaatgttatcactcgaacatgcccaccacaccagctttcctctcagttaactcatctctgtagcatatgtccattcggtggcagatccctcgtcatgcatataccatctatacatttatacatagcatctgttctgtacatttcaagtacaataagtccatttcccatttttattgagtttccacccagagagttttatataaaaatcatacatacgctcatataaccgctcccacatgtacaattcaatcattccgactttgaatatcttgcccaaacgaatatcgacttcatctgccatactctaatgctctaaatgttaatatgtgtgcgtcgtatattgttaatctctcacaaataaataattcagatacatatcgctcacgattttcgttttgtggtgtaactaacactgagttaaccgtaagattcacccctcgacgttatatgaattggacaaattgattggcatttgtaatggattttaagtttgtacaatttggtaaaatttcaatatgaaaattagcatttgcacacgattttttatgaactaacccaaccgaaaataatggtttttatttcataatttgactcgagaacttacattagcttatgtttaactctgtttgtcactccacacatcaagcattttgcccaataagtctctgcagcttaagtttgatttaagaggggggtttaagttatgcaatctagtctgtaagatattacatatatacccttatgaaccagcgtcgcccccccagctcagcggatttctcagggttttgcagagttcaaggagaggagtttatgtttccataatttatcgtatttaatttcatttattttttccacttcaaccaactaccaaccgataacccaccaccacaaacgtttgcacgtttaggtgccagccatttccttagcttatgagacggctgaatccgatattatgaaacgccagccgaggaaccccttccaagataaactggtcaacgaaaggtaaagtttcgctccgtgctgatctcgaatcaattacaacatttaccagaacaaccaacaaacaaatttcaatcaatcaaccaaccaaccaaccagataacagcaagaaccgaatttctattctgtaacgtaaatgacacatatccgaactcaagtcaagattttgcatcttctgctactctatgaaccaccaaataattcctttttgtcacgcaatgaaaagtaaattgaataccattgaactgaacttgtactttggccggccaaagtccttaaagcaagctaaaatcagagtacgctttctttctatcctacaagtcgaagataatgaaatcattttactctacttttaacctatattatccgctatatctctgtctttctatatactaactaaaatatttttaaatagcttaagtacttcttggttgaatgttgattatttggattaattccacagatgttttccatgttttatgttaaatgtttcatttggtagcttttctttgaatttctgttcactgctctcttatttagttgaatattctcaagatttttctagtctctgatatttaagtttagatagtataaagtaaatttcaaatcgattagtaattttgattttacatacataactataacactgtgagtgaatcaaggtgtgttcttagtgaattcgttaagttttttcttataagctattcctgaacacactttaattcggacttgaaggtccaaaggataccattttggataatttttagaaagatctttaaaaaatacttaaagtatattttccttttgtatttcttcatatgtacggcatttcgtaagatttttaatttgtttttgcaataatgcaatatatccaattattgtacgctgataaatgtaattgtaattataactacatatacatacatagctactattgattatataacccaaaagaaaattttcatcctattaagttttaactaaagaagacaaaaggaagaacgactttttcggataccattttctcaaatatttttgcacttaaaatatttagaaactttatattggattaggagtacatgtaaatcttttccttatagccatgaagtcagttagtttgcctttcacttttctgcttaactttggtaaactttcgctctctctctctctctctctatcactttctctctatatctacaacgattcttaaggtgttatgaaattcaattttggggcttaagcatttttcccaagatacctgaatttatgttttccagtttcggaaacattcgtacttcttttgtttgtactccttaataacttggtttaatttttttagatttatgttctactgtagaagctctacagatatttgttttggtttttcgtataaagatccttttatttgtggtgcgaaggtaagtggtgatcaacttgatacctgaagactgaggctctagctcacttctgggctatgttttcgtagaataaacaataatttgttaccatgtcaatacagatcttttacttagttcttagccctatgctagagcaggcctattgttaatttagtgagtctgtataatctatgacatatgtacgtttctactgatgctacactcatgatacggtagacgaatcttttgtctcgacatcaattcattcacgaatctccacttactaaggtcaattcgaatcattcagcacattctatcaatcaatgccctgtatttttctctaccaactctcagtcagtcattcattgaaacgtctcgttttgagttgtagttgaacgacactcacacaaatctcccccgaactcaatctgaaatccagactgaaattgtcctctagtaataataatacatatataatgatttagcgcaatttaagctctaatccattcttgtacaccctatatctgtgcatttactattacctactacttactatatatcgattttactattactgggtgctctatgctctttttgccctagattagttttagcttcgtaagtacgtgggagctaacaaaaaaaaaaaaaatgaaaaacaccttaacatgcaacaaaaaataccccatgatggtactacttgacacagactcccggcctcccctcagatctctatctatctcttacgatctactagcgattattaattagcgtataaagaacaagtatttattactcgcaagcatatttatataaaacttttaaacaaatattttatatatatttgtaaactttaaccagattttcctttgtatttccctacattctttcgactcttgttatgtctttcttttgattatcaaacaaccaactaacaattgcaacttgcacaaataccgataaccgaacaatcaataaccattaattgccatataccgcaagattccggccatttcactcgcttacgagcaagccgagagcgatattatgaagcgtcagccgagagatccgtatcgcgacaacttggtgaaccgcaggtcaggaaaactaaacgctaaggtcttataaaaaaaaaaaaaaccaaaaaccaaactccaatatccaagtgttaaccgtcttttagttgattagttatggaatagaaaatgaacaaacatgcaaccatcattatttacgttaccaactttgaactttgtttgatgttctgtggtcgcgtttcttgcatcataatttgaccgaacaagtagatcaaccgatcatcaatcagactaaaatgcaatcaatcgaatgataaattccaaatttcacccagaaacttttgcgactgtttgttcgtttgctgatgcgttcatgcgtttttccttgtttcaattttaattccacacttatgaacgtacaaaaatacatttattccacagttttgtgttttacatagttttcttttgttccaatttctatgtaacctacttataagttgctttctgaaactctcaatgtggaatgaaaatatcttttaaatattctaaaatcaaaaaatttctaaaatgtaccaatctctaaagatttcgttttgattttaaacctactttacttgatttcttatggaataactccttttatgtatccctcacttaaatccctaaatctaagtgttacatttgtggtgtgttactcgcacaacaaacttcaatccttacacacacttattgtgtatgttcaaactattgaggaacaacattcgtattgaatctaaaagtgtgttttgcaaactgtagtgccactatgaaaaaagcccaacagctgcttctaaaaaatttggcgaagttagttcaaagaaaaacgctcgctcgctcaaacgctcacctgcataaacaataaacaaaaacaaagtacacgacccatacaacaaacaatcgaatataaggtggatctatttccacaagcccttagacaagcaaaagactgaacccaacaatcataaaaacacaaaacccacaaaaaacgaagcttctgccgttactcttagatcagttagtacgttacttgtagatgagtttgttcgagccaactacaaaacgaaaatcgcttcagttgtgttctagatacaccatatgattgttatataccaaatatatacatacctagactcgttccgaaatctggttccaagtttccaagtcgtggtaagtctgaatgtgagggagggtgtcctgataaacataggtaatacttgagaatctcacaacaatggcaacggataatgatttgttatgagttccttgtgtgtaatacttttacgtatttattactcttaagtttgtgttaacgtgtaagtttatgattgagttattgttttatgttttatgtgatttcgatcgaaacttccttgaacgtaagtaaacgaaaggatgtagagctgcactcgcctgtcgtagtaatagtggcacgcttaaatgtcctgcatgttccgatatgtatgtcctgtatttagaccgcatgttcaactagcactaacaataactttgcttttcacatccacatccaatgcgaaatgtatgaaagccaaacaatacaatgaaattcaaacaattctgcgccatcacgctttctatcgagtgtagactgtacgatttgctttaacgcgctcttgaaattaaaacgagatttgcccagacactttccacgctacatagagtaatgtcttaataccactaaatctaaacgataaacatccatttgcttaaacaatccataaaagagcttcaaggtaaagtggcactaacaccaatctaattgactaaccccgagtacgatttgctactcggatcgaggactgaacggacatttgcggtccttgggcagggtttttgtttgatttcctccttaagtgttttgtgtttgctttgagtgttattcttccgttctatttttctgtgtgccaacgtttatggctttatttcaagcattcgttgatcatttcttgagtaccccgaacgacctatcttacgataaacaaaaatcctagccaagccgcgcatgttcctgttttcttcagtccgatgcccgaaactttaccgctagccaaactgtaacgagaagtgtcttgcgtcctgaaaaacaaaaccaaaacccacacaaaagaaaaagtcttgcctgcctttgagagttacctaacgagatctgcttctttctcccaacttccgacttggtcccgcccatttaactaacccaggttgatttcgatggcctacggacagatcggcatgatccaggccgccgccggcttctttgtgtacttcgtcatcatggctgagaacggcttcttgcccaagaaactgtttggcattcgtaagatgtgggactcaaaggctgttaacgatctaactgattcctacggtcaagaatgggtaagtccaaactccaattcgatcttaaacacacttcatattaactctgaattcgtactttaacgataatgtaaacagccaaggatgagttagatactagtgaccaaaactaaccacaattggagccattctaattaatttatcctatactcccatagacctaccgcgaccgcaagaccttggagtatacctgccacacggccttcttcatctcgatcgtggttgtgcaatgggccgatctgatcatctgcaagacgcgtcgtaactcgatcttccagcagggcatgcgcaactgggctttgaactttggcctcgtctttgaaaccgtgctggccgcgttcctctcatactgcccgggcatggagaagggtctgcgcatgtaccccctgaagtaagtggtcctttaaaattagaatatatcattaattaaccttgtaaataaccttccttacgaatactatagactcgtctggtggttcccggctattccatttgcgctggccatcttcatctatgacgagacccgtcgtttctacttgcgccgcaaccccggaggctggttggagcaggagacctactattaaacacccacactgctacactcccacacacacagccacatgcccacacacgaatgcacaccacaacaagagcaaccaggaacacccgcaaacaacacctacaaaccatggagagcaacaaatagaaatgtttatgaaccacaaaacccacaaaagcaacacaaccacagtaatagcaacagcagcagcaacggcaacaacaacagcaacagctacgtctacaacaagctacagcaagaacatattacaatatattttatttttttaatttaattatttaaagtaaacgaggataaacaaaaatgcaagcgataattattttaaacgttaagtaaatttaaattataaattaaagctaaaaataagatttaaataaagtataaatgaaaataaaacaaacaacaaaaacgaacaacaatttcgatgaaacaccaatcacatccagacaagaacaacaacaaaatcaaccagtaactaagcaaaacagtaacaagaacatgtttttagtaaaattattaacgtaacgagaactggatgaggcgatttttatcgccacaataacaagatcccagaaagctaacacacacacacgcactcacaaacacactcacaaatacacacacacacacaccgatacacaacgcatgacgagacaaagtatataagaagtttagagaaattataaaacgaagtaaataaaaagtaaaatgaggaaagaaaacaatgaaaacccctagcgtagttaccaagtaagccgtgaaaagtaaagcccaataaaaaccacaacaacaacaaccaaaacaaaagaacagaaattaatttgcaaaacttgaaacttgtgtgtgtaaacgcagcttagcgcagaagaacgaaatatatatataaacagaagaaaaaccacaagaaatgtgaacacgacgaatataattgtttatatatatacacacatatattatatggaaaaaatttgattatataaatggagctatacaacaatacaccaaaaaccaaaattgaaaccataacgaaatcgaccgatctgcacttggcactacgccgagttccggataaaggtctccgagcaatgtttggagacctgccggtctagaatttgttaaaatctaatgaaaaaaccaactaaatgtttaataataaacccccttaaaccaattgacatgcaatattatgctttgtgtgcatttaagcccaaaagaaccgatgccgagattcggtgggattaagtcccccgatgtcgatatcgagattcagatacagataccattaccgatacctaggcccagaaggaaaagataaaaccaaataaaactaaaaaccaaattcaatacgaaacaaaagaaaacaaaaggaaaaa

SEQ ID NO: 28 - protein, 1002 aa, Drosophila melanogaster
MPAKVNKKENLDDLKQELDIDFHKISPEELYQRFQTHPENGLSHAKAKENLERDGPNALTPPKQTPEWVKFCKNLFGGFAMLLWIGAILCFVAYSIQASTSEEPADDNLYLGIVLSAVVIVTGIFSYYQESKSSKIMESFKNMVPQFATVIREGEKLTLRAEDLVLGDVVEVKFGDRIPADIRIIEARNFKVDNSSLTGESEPQSRGAEFTHENPLETKNLAFFSTNAVEGTAKGVVISCGDHTVMGRIAGLASGLDTGETPIAKEIHHFIHLITGVAVFLGVTFFVIAFILGYHWLDAVIFLIGIIVANVPEGLLATVTVCLTLTAKRMASKNCLVKNLEAVETLGSTSTICSDKTGTLTQNRMTVAHMWFDNQIIEADTTEDQSGVQYDRTSPGFKALSRIATLCNRAEFKGGQDGVPILKKEVSGDASEAALLKCMELALGDVMNIRKRNKKIAEVPFNSTNKYQVSIHETEDTNDPRYLLVMKGAPERILERCSTIFINGKEKVLDEEMKEAFNNAYMELGGLGERVLGFCDFMLPSDKYPNGFKFNTDDINFPIDNLRFVGLMSMIDPPRAAVPDAVAKCRSAGIKVIMVTGDHPITAKAIAKSVGIISEGNETVEDIAQRLNIPVSEVNPREAKAAVVHGAELRDVSSDQLDEILRYHTEIVFARTSPQQKLIIVEGCQRMGAIVAVTGDGVNDSPALKKADIGVAMGIAGSDVSKQAADMILLDDNFASIVTGVEEGRLIFDNLKKSIAYTLTSNIPEISPFLAFILCDIPLPLGTVTILCIDLGTDMVPAISLAYEHAEADIMKRPPRDPFNDKLVNSRLISMAYGQIGMIQAAAGFFVYFVIMAENGFLPKKLFGIRKMWDSKAVNDLTDSYGQEWTYRDRKTLEYTCHTAFFISIVVVQWADLIICKTRRNSIFQQGMRNWALNFGLVFETVLAAFLSYCPGMEKGLRMYPLKLVWWFPAIPFALAIFIYDETRRFYLRRNPGGWLEQETYY

SEQ ID NO: 29 - protein, 1041 aa, Drosophila melanogaster
MALRSDYEHGRADSYRVATVIATDDDNRTADGQYKSRRKMPAKVNKKENLDDLKQELDIDFHKISPEELYQRFQTHPENGLSHAKAKENLERDGPNALTPPKQTPEWVKFCKNLFGGFAMLLWIGAILCFVAYSIQASTSEEPADDNLYLGIVLSAVVIVTGIFSYYQESKSSKIMESFKNMVPQFATVIREGEKLTLRAEDLVLGDVVEVKFGDRIPADIRIIEARNFKVDNSSLTGESEPQSRGAEFTHENPLETKNLAFFSTNAVEGTAKGVVISCGDHTVMGRIAGLASGLDTGETPIAKEIHHFIHLITGVAVFLGVTFFVIAFILGYHWLDAVIFLIGIIVANVPEGLLATVTVCLTLTAKRMASKNCLVKNLEAVETLGSTSTICSDKTGTLTQNRMTVAHMWFDNQIIEADTTEDQSGVQYDRTSPGFKALSRIATLCNRAEFKGGQDGVPILKKEVSGDASEAALLKCMELALGDVMNIRKRNKKIAEVPFNSTNKYQVSIHETEDTNDPRYLLVMKGAPERILERCSTIFINGKEKVLDEEMKEAFNNAYMELGGLGERVLGFCDFMLPSDKYPNGFKFNTDDINFPIDNLRFVGLMSMIDPPRAAVPDAVAKCRSAGIKVIMVTGDHPITAKAIAKSVGIISEGNETVEDIAQRLNIPVSEVNPREAKAAVVHGAELRDVSSDQLDEILRYHTEIVFARTSPQQKLIIVEGCQRMGAIVAVTGDGVNDSPALKKADIGVAMGIAGSDVSKQAADMILLDDNFASIVTGVEEGRLIFDNLKKSIAYTLTSNIPEISPFLAFILCDIPLPLGTVTILCIDLGTDMVPAISLAYEHAEADIMKRPPRDPFNDKLVNSRLISMAYGQIGMIQAAAGFFVYFVIMAENGFLPKKLFGIRKMWDSKAVNDLTDSYGQEWTYRDRKTLEYTCHTAFFISIVVVQWADLIICKTRRNSIFQQGMRNWALNFGLVFETVLAAFLSYCPGMEKGLRMYPLKLVWWFPAIPFALAIFIYDETRRFYLRRNPGGWLEQETYY

SEQ ID NO: 30 - protein, 839 aa, Drosophila melanogaster
MPAKVNKKENLDDLKQELDIDFHKISPEELYQRFQTHPENGLSHAKAKENLERDGPNALTPPKQTPEWVKFCKNLFGGFAMLLWIGAILCFVAYSIQASTSEEPADDNLYLGIVLSAVVIVTGIFSYYQESKSSKIMESFKNMVPQFATVIREGEKLTLRAEDLVLGDVVEVKFGDRIPADIRIIEARNFKVDNSSLTGESEPQSRGAEFTHENPLETKNLAFFSTNAVEGTAKGVVISCGDHTVMGRIAGLASGLDTGETPIAKEIHHFIHLITGVAVFLGVTFFVIAFILGYHWLDAVIFLIGIIVANVPEGLLATVTVCLTLTAKRMASKNCLVKNLEAVETLGSTSTICSDKTGTLTQNRMTVAHMWFDNQIIEADTTEDQSGVQYDRTSPGFKALSRIATLCNRAEFKGGQDGVPILKKEVSGDASEAALLKCMELALGDVMNIRKRNKKIAEVPFNSTNKYQVSIHETEDTNDPRYLLVMKGAPERILERCSTIFINGKEKVLDEEMKEAFNNAYMELGGLGERVLGFCDFMLPSDKYPNGFKFNTDDINFPIDNLRFVGLMSMIDPPRAAVPDAVAKCRSAGIKVIMVTGDHPITAKAIAKSVGIISEGNETVEDIAQRLNIPVSEVNPREAKAAVVHGAELRDVSSDQLDEILRYHTEIVFARTSPQQKLIIVEGCQRMGAIVAVTGDGVNDSPALKKADIGVAMGIAGSDVSKQAADMILLDDNFASIVTGVEEGRLIFDNLKKSIAYTLTSNIPEISPFLAFILCDIPLPLGTVTILCIDLGTDMVSLDLCPKPKLHRRLKLKLLLSQYHSSKLYSYTSCSPSQLIVKN

SEQ ID NO: 31 - DNA, 36185 bp, Drosophila melanogaster
gaagcaaccaaaacaataacaacaacaatagaagagaacagcggcaaacggtttttcgctgcgcttctcctattttaagtgccgagcgttttactatttttactacacagcgaaacatacacagatacacatatatacagaaatatatgtaggtatttgttgatgtgtttgttgtgcttcagtcaacaataaaaacaaaaacagtgtttaaagctagtgaaatgatcttccataaataaattttcaaaattaatttgagagcaaaaatgaattgaaagaaaatgccaagaaagtgcagcaaaaaatcaacaacgatgctgtcggagagtcgaaactaggctaaatatctttgcatacttttgggaaagttgtgcggtacaaacacacacacccgttcgtaacacacacacacaggacctgcgcctgcggtcgccgacttttgaacctgttttctgaccattgaccattgaccaccgaccgccgtgccggccgcctcttttcacttttggcaacgcggactgcagcagccgctgcaaaaaatgcaactgtaaaggaagctgcaagaaaaggaaaggatgtgcacgaaaacggcataaacctacaaaactagccaaaagagttcagagcggtgcggttcaacagcctccgggtgttcgtgtcaagctcgaaattcgcaaattcggcgtcagcttcgtgcatctgtatctgtgtatctgtatctatatctggtgcatctgtgtgcggccattctgcagttgcagctctgcagcggcgaaaattgtgtcagcagcatcggcagcggatcctgcagctcgccacactggcgcctccatctccgattgccggtaatgtattcgttttaggcgcattctacccaagcacgacttaatcatacgccacatgtgaagtgccgtgcggtatggctaaggcattacgcatacgccccgtgtatgtgagtatgaatagtgcgggcggtcttaccttgacaacggacgggggcagtccgtgacaattgtcagtttgttttcccattttcgtttttctatcgattaagcccactggcccctcgttcgccctttgtctgcgaattagcgacaacttctgggccaagcagcatatggctatgtccaccgtctttgtctaacgcctaattgagtcttttgtgagtatcaagagacgagcagcaccgcagaagaaaagaaaagcaaatggggaatccagttgacatcggcataagttcgagttttaagttcccttgtggacagctggtttttgggctttctcgactatcacataccataactgcaatggactttttttggatcatttttcaaattctgggcgttacatattttcttgatcatgatcgactcggcttgtgatccggaaatgtatttactgtagaggatataactaactataaataaagctgtatggcatcctagctttgattcttacacgctgtaagaaacgaatgtcagtaagggatataatgttaacattccaaaaggcacgtctcccatatgaacatataaagtatattaagactcccaagaaaaagtaaagaacttcgccagaaaacgttaggcttatgatttcagatttcagagcattaaaccacaaatgattatttatatgaagtatattttactgtcccgcttagatgaaatttttcgcttatactgtagacagtgcctaaagtatcatgccatctgatagggtatccatagaaaggaaccaaagaaaacaatcaacacggagactagtaaacaattgaaaagcaaaaaacccgcgactcctgcccaagtcggccagccccttgagttcttttttcattcataggacgatgggtggtagcatttgcctttgtcaatatcattcaagctttcattcgcttcacttgcctgacatttgcttaccatttcagtttagagttcactttgtttccctttgtacaaataaatagccatttattcattcactcggttaaggggctccttttcactgaccaatgaatgaaggaaggtcgtcccataagtatttgtcaattggacacaagttacaatggaactcagtttggggctttatatctaatcaaactaaatggcagccattaactagctagcttaatcaagtacccaacatcagcatgactcgaagcactcaaaatgctcgattttctgattctgataagaggaatacctcgggtaatttaaaattgagtatgcagcatattcagcgaaatgcagaaaatccagatgaaacaagattttggaaaattcatttaatttatggctccgtcaattaaaagcaacagaccacacagccaaaccgcagtacagctctcagatgaaaattcagcgctttaaaggcttagagaaaagtggcaggcactcaaaagcttaggccttgcatacgtagcagccgcaaacagtggcgaaaaattctacttttttccattttcggtgtgtggggcgaccaacttttctaactaacaaaaaaataaaccgcgcacatgtgtacacaaaagaaactcgacgaagaaaactgcaaatatgtaacaagattcggtcatgtttgattcatgaaaccagcagaaagttccagcccctcacccaattgaacaacaatggtgaaataaagttacagttgctgtggccacggcaactggaagccaacatttcgcacaatggcgcagaatcagcagctttagcagctgccgtgcttccggaaaaaatagagccccaaaaagcatactttcgagtgtagagtttatgcaggattccgttgcagcagagttaatcatacatacgtcctgacagtaacaaatctccagctacgaggcataaataaaaaaaaattcacccagcttcgctttacatattttcctgttagatttaccgtgtatgtgggcatcaaattgcgcatacgcccagtaagccgtccagatgggcagatctgcaggcaatttgattatggccagcgaggcataaagaacgtagagaaatgctgaaatagggcttacttctaagccagccaagtcgagcataaaatgcaagcagagtttggtggaaaaaaggaaacgcaaaggactcgattgctcagtttctcgggaacggcaattaaattgcgatggcgatgatggcggagccggagaatatgtataaattaaaagagataaaaattccataaagatgacaaaaatcaaaaggaaagaggaaaaggcgagggccataaataaaggaaaaacatctgaaaaagggacgcgaaaatggagacagaatcacaaaaatggcggacaaggcgctgacaggcgagccttaagtcagcttttgtggcgaaacaaaagacgcgcgaaaagaacaggatattgggatatctaaattaccgttgtcacgcacctaagttcacacacactgagtcagacacacacatacagaagacatacagcaagctaacaaacacactcacagcacgtacacatcgaaatgtcggcattgtgtcagcacggaaaccaaagtgaaaacctttcatttcacttctctccgcccattcaaatggtcgagttccattgactgagcgaacaaaggccaaggaaatgataattttccgctcaacagacacagaaatatctacatgtgtgtgtgtgtgtgtggattcggttgtcgaaataaatggcgaagaaatgaaattgaaacgctttcaattaactcttcgcattgggtagcacttaatccttgtcacattaactggagctcgcactctggtttcaattaggtcgatgtgacgcgtgtttgaaatattcatcgagggcccagccagcaaagggcataatcaggtgcgttaaggtaaataatttaaaagtgtggggggcttctctccacactgatacatgtcggataacacacacgccagaggaatcttcatctgccctcgttcgaacttaatttccatttcaattttctccattcactgaggaccctatcttggcgtctcacccattccatcgttgtgccctctcactttactagaattgggccaaaactacacagacacactaggaaaatttattttgtgaatttttgtttaaagaacataaatttaaatttcttgtctgcttatagattataagacctccggccaaaagtcaacgaactaaatattttaaacccattttaaaatgcggtttaaacccggtgttcttaactatcccggcatttctggaagtatgaactatttaagttaaattgagcttaccaaattgattttgctcagtatggcatgtacgtagttagctagggggcgccattttggctctgtttgtcggctccctaatggatttccaaggcggagcataacaatttgtttgtgggccgaaactgttgctccggccggaaagcttgccacatgattactacgatgataacggcgtcggtgatgatgatgattatgggaatgggataatgtgacttttcccagcgatttgaaggcagcctgcaccatcgttgccttttccatgcccaagcaagcacacaaattaaatgacaatggcaatgctgtacagtgcttatcggctatgaggatcaacggtccgtccagcaaatcagcattgaatcattggggtaaacaaaataaacgaagaactaaaatcccttggcaaaatgtttgctttgctgattgccacgacttaatcaagctatctgcgtcagcatttactagcactggaagattgattgatgcaccgactgcttgctacttttttcccgcccggggtaacatctggtcaactggtaaaccatccatcaggtatcatcatcatcgcggatctgacgaacctgctgctgacacacggcaaattgtcgagtccagtcgcaacactttggcgaacacaactggcattcttgtttcagttaaagtttttccgaaaggagggagattgaggttgggacaacccctgcggaagccaatgttgggtaggaaatagtttgagctaaccacccacccacttgatatggcaatggcgaacaactttaacaacgctatctaaaccaactttggcatgtcagggcctcgattcctccgcattcgagtgaaaactggtttggggtggagctaaaaaatcaataggagcgctgcgacatacacacgcatatatttatacggcacgcagctgctttccccatttgccacttcccaactccatctgctttcgcttcagtctgtaaatcatggccagcaagtgataatatcctgcccgaaaactcgacttgactcgatttgacactgccaccgaataccgcgattattcatttaaagcgagcttatcgcacggagaattattctaattttgagaagcagtaaagaaaactatagaagctatggaaagtagtgcaaacagtttacttgtgcatcccatatatcttccaacttaatggggcttgtttttagagcattgttaattataatttatgatcgagtttttgtctgagactcgctattgtgaaatacaactggcatttactttcagccagatgacttcatggttgttccggactcatggaagccctataagaaaatactattactcagagcaagacgtgactaatgtgtgtaccaacgtcctcgagttgttttctccagtggtagagaggaggaaatcctctaatgaccttttctgcgtgtatttctaatgcacataaacgttggtggcagtacatagcgcaatatgaatggcaaatggcatccacatcctctgtggcatgctgacatttaaggttgatgtgatttgaaatcaaatcaatgtcaatgccagcccgcgatgctgatgctttgatatgcgatgctggccttgattgcgctgcctgattgccattgaccagtgatgtgagtccttaaaggcagatatggaagtgcataattgacagaccagcaggcatctatccgccgcacactagtgcagctcccacacacacgtaaagtgagctccgagattggaatgtgtagcctactttcaggcacgcagcctaaaagcctgtttccgctgattcgagaattggcgccttgttgcgtccgttccgcagtcaagtggcaagcacacgcccactcacgcccaagcactttcgttcagacactcagggaatgatcaaaggatatacacttataaaagtattattaaacgaaatccaaagaagtggaactagaatgctgattatactacatttttatcaattcttctgcaatattagttagccattaaataaattagtttaattgtcaagtaaccaaaaacttttaatgcagacccattttaaatgataaatgatatagttaaatgtgccattaagcggtgcttaaaaagtcaaacatgataaattcgctaaacgtgcgactatttaaatcttaatccggagatttattctcggatttgtgagcgtacctttgcagaagtgtgaaacacagttataaataaataagaatgctcgaaactcacacagccgcgcacatcctcacagaaagagatataaaaaaaggatattgttaaataataaacagtttacgctctgacaacaacacaacaggcgtgaaaatgaagggcggcggggcgtgtccgttgaactgtcaacacacaatgatacacatctgcacatccactcactcacacatctacagcagataaggaccctcacactcacacccacacacacacaccacaccgcaccacactcaacacacaagttctgtgacaagaaggcatttcaaatcgacgattcgcataacgaccgtcatcaaacttgttgttataacgtcgcagctacagcaacaaggacaatatcaaaatgtcgccaataaccggggggtttacggtctaaaatatgctgacaacgccaactgttcccactcggtcccgtattaaacatgtcattttacgtcccaggactcgaatatctaaccgtgaacagtgagcactgaacaccgaaacgtatcagacgttctcttgttagcataacgaatctaaatacctttgtcacggaagcctgacaaatctagtccgtgaaacaaagcccccacaaaggatatctcacaaactatggcaaaccttatctgcctggcaatgaaatcaccaacactcagaaggctctttcttgtggaaagcgatttatggcttaggtaaagtgtgcaaaaacattcactcgcagatttcgcctgatttgggattacaccaaaagacttaaattctcggtgaaagagtcaggcgacttgtgcgttttcatgttgtagatatttttggctttagctaaatatttaattcggttactttcggttgggccacagaccttatctaagccatgagcacattttgtgtctatggcatatagatagattgtatcattaagacaatgacgcaatagtagctatcaggcaatactcaatatgagcggatcgtataacaccgcgaagcagaaagcgcgaatatcaagatctagagtagctatcaggtatggtcgcacaaacgtaattgccccgacttatcgccagtggctcgggaccctccattgtatatctccctatcgagtctccgtatctgaggccgctccgtgcgtcatgtatatgcacatacatatatgtacatctatatgttagccaggggatagaaacggggccagttgatatcggcggctgccaaagtggcgatttgattagacgacacgcgaatgctctgatttatacttcacgaaaatcaaattcgaaacagagctaacgatttacccaagagtcaagcaccgaaaggaccgaaattggatccccaggtgagtgcgtgccacgcccatcactcgacgcccagccacccacgcatcccgttatctcaccagtactgcgcacctggctgagcggcagtccggcggctcagttgcttgccaggaagcgaacccacccgacgggcgggagaaactatgcattgtcacgcctgagacaaacggcagggcgatcaagtacaacatccactcttgagactgcagcgttcagtttccggtcaagtcccacttcaagattcccccatcatccttatccccgccagcgcagagtatatagtcaattccatcccggagtgagtatccctggcgacaaatcccatagcattttacttttattattcgagtcgagtatgagatgtctaagactattcacagtggcggtcgaacgactagcactccaaatatcaaacatttcgtttatagctattttattgtgaaaccataaaagtgaaacttctgtgaaccgaattcttatactcgagtgatatcaaattgtataagtgtttctgtatctacagagcaattgataccctaaatattggcaaaaaaatgagtgattaaatgtgattagaacagtgttatattaataattactgataatgcttgcacagttcctattctagaaatgtgttactttcttaatatttcactgaaatttcatatggaaatattaacaatattttataaattctacattggtttgaagaaggcttttgttgacaaactcgtgcacaatgatatgtttaggccaaaatccaggatttaaaatcgtataatatataggatccggtgccatcactttaaacgatgcaatttttcgtctttgcttattatatatttttctgacgatgatgtcatcgggattgggataagagagtttggccactatgtagtgtttgagggcatcttcagtagttgaggttacgagtctggatacgaacacagctttcattggaggtacagctttaagaataaccggattggtatgtagaggtagtaccacgggagccgcattatgatgccatattttcgctttttgcatattcgtagaattgtgttgaacaatagatgactctgcatcttcaacttctttgtcatcattagtatcttcaaaagtgtgtaatggattagaacttgaatcactgtccacagggtaaatcggtttttgaggatctactattaaataataaaaaagataaattagtcgattaaataatcggatagttaagatctggatcttacgagacgtaatatgcgattctagcttcgccaacttttcatagacggctcgaacttccctaaagagttcagttatttccgtacgcgtttgcttcataaatcttcccatctgagatttgacaactctgcaggtttcacaggtccatttgagtccagttcttccttcaatcatttccactacactatcagttatgcccgcgcacttcgcgtgagcatattcgtcacacaaccagcacctaacatgctcatcattggaaatcgaattattgaattcgcacccttccatacagcagatcaacatttccaaaattatgttggcaagtgtacaaagcaagcaaacaaatgagtaatatcaccagtcggcgggttgggtccacaataagtggaagagataactgtgcacgacactccaaaactttaataattttttttagtacaacaatctttttattcaaacaataatcacaccaacatcgtatgcctttgtatgaaaaaaatacaacaaataaatgcgttcgaatataaatttaaaaccgatctattgtataaatataagaaataacggtaacgtctaaaaaatctttccggagcactgataattgcgtgaatatgtttcgaggttcaagtgacgaatgacgacttattcttttttgtcaatattggggaaacagacccccaaactgccaacttaatcgctaaaccaagttctcgttactttaacaatataagttgaatgacactttaccagtacgaaaaaaaaagatttgagaattaaagctgtaactcgtttaaactagtaccgaaaggcatatacattgggattacgataagattgtgttgtgaaaatcaaacaaatgtcatatcacaagcatagaatactaaatattaattatttcaattcgtaccgaaaaatatcacctggtgtactagtattttggtcgtatgcgtacattcatgacgctttgtgggaaaataaatgaaatgcccacgaaaaggcgcttagctgggaaacggaaaatatgcgaatgaattatgtgtgcccacctaagcatatggtacatatagtatatcaacatgatttgctgtaatcctcaaatatctgcccggcatattgcgtttgggggtctctaccatcgcatcgtcttttgttcgcgaggaaagtgtttttgaaatgaagagccacacggccaacaaaattagcacaacatttgcatggctaccaaatgattgcctgcattttgtaaaacttagctgaataccacagacaataacaacaagccaatgaacaaatagcaatacgaaattatagggcagagagtgaaaggtggagggaaatcaaatgacagagagctcgaaacgcaagcgagtggttaataataaaaaggggaatcatcacacgcataaggttatatcagcatttaaatactaaacagcaattcgtttgttgaaggctgtttaaatttggatttactatagtcccgcattaaatgagatttattactagaatttatgtactgctctatttggagcattagataagatcgactttttttttttatctctgtgagtaattacgaaatgcgagactattcctattatagttgggggaaatagtacattacgaatggtttggcattgagcagcagagctgcggaaatatatttccacaataattaaaaatacacttttatgctctttgaagaaatcgtatttccccgttagttaatatcaatcagatttcaacgctacagctggttcgatagcttttttcgacccaatccgacccgaccccctgttttttttttgccatattttccgtgtctgagttcgcccgatttcccaacgcatgtaggtgggatgggggaaagcgaaaaaaagccgagcagagaacaaaagcaaatccgtgcccacgaaataattatgaactgggggacacagagacatcaacatgacagagaaataccgacggatgaagggagaacagagaggcagacagacaggtggtaatatggggattctggctgtggatttagttgtgcctgggctgccaaatgcgattgcgagtcgcgaaaaaatggaatccgaaatctgtgccagctgacgagcgactgaacttggcggtctctacatgaaaacatctgtaccgggaattacttaacagccaattagactttgtgtttgatttactagacgatttcaagcgggaatgttccttgaacttggaagcaaaccgaaaaattggatcgactcgactcgaatccgtcgaaaaccgtatgtatgggtgcttgtaaatacatacatatgtatacaacgtaacagcgccaacgcaacgtaaacaaaatgcccctccatacggcccgctcattttgcccattctcatttccacactgagaaaaaagccgaccaatcgtagtgtctaattagctatcttaaatggaaatatacctccattccagtttccaaaaatgaaaaaaaaattcaaatttttgaaattgttagcctcgttactgcttagttaaacgcgtttcttctttcaggatcactagtccgtccttataagcgtcgtgatctcggaaactagaatattttgaatacctcgcagttcccctaacgaagtaacgggtatcttgtagtcgcggcactcgagcacaacgatctctctgtgatttctctatgtgtatttctattcgcattcccacgttcatactctttcatattcgctcagtcgcattctcagtcgcagtccttggcgaaacgcggcgcgttcgatcgccagacgattatattattttttgtttgtgctaaatttaaaaatccacgttaattttagtgtttcggcctttgacgagcataaaggctgcgtgaaaaatcacgcttcgagatccgtttgataagctgggaaatgtaagcaagcgcctttggcccgggagcaaagttttttaattaatttgcaatctcttcgcccgacgtgcaaccgttttccaataatggccaaatgcaatttaccgccggaataaagtgcgatgtggaggggggagtgaaacgcctgcccagcatatgttccgtgctcccaggggcgtctgtttgtctcatcatcatttactatctccgctttcttcgctttcactcacttctccattttcccagctgctctctgtctccctcccgcgccatcgtctgtcccgctctttgtctatctatgtatatcgactgctgtcggctcttgttgtaattgctaaattaatgcaagcgctgatgattatcttagcccctgcgccataaacggtcgggcatattgatttattggatttcgaagccagcgacaaagtgttgtgccatccgaatgggtgtgtgatccaaatgtgcatattaaataaagagaaatattcgaaactataaataaaccagaactttgactgcaactgctagccaggcgaactttaaacaaaaggattgtggagtgagaagtattccctgcaaacaaaagagcttcctttctgaactctgaagacaagtgacatatttttactgttaacaggccattagtgtttcaaacgaattaagagtaataaattctaaataaatttttccgaaaagtaaccttccgcttcttccaaatcatgccgacatgcaatctatctcaaaacttataatattgatacttttttaatattaatgaatgaacccatttataagatataaatatatatatgcacaatatttaagcaaccgatggtattcggatccacaaacatgcatatgttcaacggcgtattagttaaaatgataaaactttgtttccccctttttcgggaagaactgttaacagtttttatctgcaagtgtgcacactgcattcgttcgtatttttcttcggtccgtcttgtcagttagtcacttgtttgctttttattgccatccaaacgttaatgctctgggttctgtttctagttcccggtattgacattggcgaaatatctgcaaacatatgtgtatatagaatatcgatcttggtcagtcccgtttctcggcattttccgctctcgttcggcttgcaattcaatttgcaacaaactttctgcagctgaaattcatctcggtctgtttttgatttcctcggaaaattaactttgtttgcctgtagtcttgcgtctgctctgccagattttatagctgcacttttgtttatgttttatgctgtctatttacgcatttaatttcgttttcgtgtaaatacacaaaacagctgaatagagaatgtctggcaaggctcaaagaaaagctgcacccgcctccacggaaaatacggactctaattaattttagtttccaacactatagaagattgtttcgtgagtacgagaattttgtaaattttgaatatttttacacttttctgttgatatggtggtattaaaaacgtttacagcgctctaaaattgattttacttttcttttaatttatttccagtactaatagtcatgttgtatttcccttaacttgaaattgtagaagatacattaattagattttgtatttataactacaatatttcaaaatattgtattttctacagtttgtaaactagtaaaagtgcgtcttaggggacgactactcatttgtagagcttttttaaggggtaatttattgagataccaatgcacatccaaatagacaccaacccgatgaggcatcccgcttggcgatctgggcgggctcttctgttctagcgactatttgcgggctttcgcaaccttcgcagtggcattgcgctccgctcggcgacacactcgtgatgcaattcacccgaaataaattcccaagaataggaataggaaccgcactgttagtggccgccagtcaactaccaactaactaataagtcccttcccttccgtttctatcccccaggtgcagcggcccaactgcgtcagagtgttgaacgtgccattgcgagaatgccttctcgcggtcccacgtcatagtcaccatcattagcaccgggccataacgacattggcaacttgcaactagcaacactcccattagcaacactaattgcaactgcagcagcaacaagcgacagcaacagcaacaagcagcagcaactagcaactgcaacagcacaaatcacagccaaatcgaacgcaacaaagcttccagagacaggccaacgggacagcgagtgccccaatcacttccaggataaggagaagccatcccagttagtaaccagccatgcagttgctccttaaatcgatattcacctgcgcactattcgtgatctttgtgtatgccaccgcccagtcgctgctcaaagtccaggagacagaagcgcggcaggcgtaccttaatgttacctcctccagcagtagtaatctcagccaggacgatggccacttcctcagccggcgactaaggcaggtcagccatggcgaggagggcgacgagggcgcgccgtcccaaatggacgacgagttggaacagatgaccaaggtgcatggagaagcaccggacgcggaggagctgcgcgaatgtagcgagggtcttgtcctgccactctggatgccgcaacgcaacatttcggtgggtgaccgcctcgtccgcggctttgtttacttcgtcctactgatctacctgtttgtgggtgtgtccatcattgcggatcgcttcatggccgccatcgaggcaatcacatcgattgaacgggcggtggtggtcaagggacccaacaacaccaagcaggtgatgcacgtgcgcatctggaacgaaacggtggcgaatctaacgctaatggccctgggatcgagtgcccccgagatcctgctctcggttattgagatttatgcgaaggacttcgagagcggtgacttgggacctggcacaatcgtgggatcagctgcctacaacctgtttatgattatcgccgtatgcatgatctggataccggcgggcgaggtacggaggatccggcatctgcgagtcttcttcgttaccgccctcttctcggtcttcgcctatgtgtggctgtggctcatcctatccgtgttcacgcccggcgtgatcctggtctgggaggcgatcgtgacgttgctattcttcccgctgaccgtgctgtgggcctacatcgccgagcggcgtcttctggtctacaaatacatggacaagaactaccgggtcaataagcgcggcaccgtggtggccggcgagcacgaccaggtggagatggatgcggagaagggccccaaacaaccaatggtcacatccgctcgcggaaacgacgccgaggccttcgacgaggcccgtcgcgagtacataactttgctgacggagctacgccagaagtaccccgacgccgatctcgaacagctggagatgatggcccaggagcaggtgctggcgcggagcagcaagtcgcgcgccttttatcgcatccaggccacccgcaagatggtcggcagcggcaacctgatgcgcaagatccaggaacgcgctcacagcgatctcaccgaggttaaagcccagctgcatgcgggcgatgacgaggaggcggacgatcccatccgaatgtacttcgagccgggtcactacaccgtcatggagaactgcggcgagtttgaggtgcgcgtggtgcgccgtggcgacatctccacctacgccagcgtggagtacgaaacgcaggacggcaccgcctccgccggcaccgatttcgtcggacggaagggactgcttagcttcccgccgggggtcgacgagcagcgcttccgcatcgaggtgatcgacgatgacgtatttgaggaggacgagtgcttctacattcgactcttcaatccctccgagggcgtgaagctagccgtgccaatgatcgccaccgtcatgatcctggacgacgaccacgcgggcatctttgccttcacagactcggtattcgagatcacggagtccgtcggccggttcgagctgaaggtaatgcgctactccggcgcccgcggcaccgtcatagtgccctactggacagagaacgacacggccaccgaatccaaggactacgagggggcccgcggcgaacttgtcttcgaaaacaatgaatccgagtgagttgcattgttttattaattatttacaaatttgtatatttatgcatcaactaatttatttctgaataggcctttatggcctaacgtaaattgtgatacgatatttcctgattcaatttcatagtattgaatatttcatatatttatcatttatgctggcttccgagaaactcacagcattgaacgaaagtgaaaccgatatatctatcttaatatgttgcatattgccacagaactaatcagtttataaactaattggtattggattgcagctacaaagggagtttagatatcagtcaaaatttgtataaaatcagataaataattaaagcctgatttagctgacttaaagcatgttatgagcaatttaaaagtcagaactaaacacacacaaattatcctgttgggacaaaacaggacaaagtttctcgccccctttgttattgtgtttgacccacataaggctaaaccacctagataacattagttttcgctcgaaacgccgggttaagttttgcctacacttccatgccttgagtcctggatagcttcacccgccattccggcatatcccgacgcccgatgtcacgcaatgcgatctcccggcggagtttttcgacaaactcgcaatttccgctctgggaatagacaggcggctggatgtgcgtgagacagtgcgccgcgagtcgattaaagtcggtttgattggggcttttaattgccgcaccagctggcggataatgacattggcattgccattggccagcagcgagtttcagtcggtatcaacttcgaaaaatggcaaacatcgagcgcctgggaactcccatccccaaactcctaccgcgaatccattatgaaccggtgaatgtgtgtatcctgctgtgtgcccctggcccaattgtcctggccgcgtgctagatgacaacgccagacacccacaacacccttcccctccagacattaacaccctgctcgcagcccaagcaagctgtaattaattttgcaaaatttattcatttcgacaaacatttggcagacgacagccgcagtcagttaactgcgtttgcatatgtttttgcggctttcatggccatgtccgaaatgtcggccgacacgcaacatggccacatccacatcaaaatccgcatgtgggtcaccagttatggttcgagggtggctttttaagatgatttatggcccgagaaattgggcagcatatgccgggaattaggctggccgagaatctgggaacatggcttcaatttgatgggtactaatcatgacttacttgctgacttaattaacgcaacaactattcacactggcatataagatatatatcgaaagggtatttctaatttaaagatttagctaacgccatattaaccagtctttaataatattaaacaataaattttggttatctatggaacaagtttatactctcaaagatataagctgtttagcaactaaaattgtacagtagctatacagcataaacttatttctaattgtctgccaattgtttgctatagaatagtatctatgtagatatggatggtaattttcgttcactgtacttaatgtttattatgtgaagcacttacccaggggcacttgtcgtctgttgttgttccttagactccgctgcacaaagcctcatttatggctgtcccaggccgtcctggttttctgcactcccctgggcggtttcgcgtaaaattgtttcaaacacgtcgccacagacacaacatgaatttttgagggttttgcattattaagtggcaacgaaagcgggcagacaattagggggcgaggcacgttgaatgtcagcgagggaaaacttacaggaattaagtggcaacaacgatgacgtgcaacgtgcgaggatgtacaatgatgtgccctggtgtcctggtgcccgtgtgaaacgctcccaaagtgctcgttagactgctccggagttggctagtcagtgctcaagccgttttcccatttgccacgccagttggaatactttttaatgtttgtgttccgattggatggatgcaattgccgggaccccactttattcgcaattatttgccaacttttaaagcgcttcattgtcgccagagcccgaataaattctctgagcactgagtgcacgtcctggcgatccttgcggcccttttgcggcatttacagccactcaagttgaatgcctcgcggtgccgttggtaataatgtttgttttaatgttgccagtttcgctggcaacttgccagccaagtaaccccaacaatcctggccgactggcagctcaacttctcctacacatcgatgacgatctcaggggcatcttcttcgttcatgcctctcaaatgaaaagttgtcgtaaactagctgccacaattaaggcggtttttatgtatttttaaatgaccattaaagagcggttcgtttaaagttacccgaaataagtgaaaaacaaagcgggcaggcaaattacattgctggaaaatctactttgaagtcgatgcgtgcggctctgtggctgcaataaattttagttttttccctgctctctctctcaatttaatgaaaatcaaattccccccttgcgaacctcacagccgcagatgtacatattgtatatatgtacatgttgatatagccatactatccagacttttgccagctttcaggcagcggaaatgcgcaacagcagcagccacgtcgagccgctcgtcataaaaaacagcagcagaaacagcaggagcagtcagtaatgccataaaatttcccaacgaaactgaaaaaaaaaaccgaagaaaaagtaagtgggccgggctacaaagtgccaacactgttgcataaatttgtataatctcctgggctacgaagtgggcacatttggattgagttataggaccttaaataaccgacaatgggcaaatgggcggctttgagcacataaaagtcaaacattaagtatgcgaaaggcaacggagctaagagaaaatattttattaagcacacataatctaaaattgaaatttatgctattgtggtagctggaatccaaccaacttacaagctatcatcgtcctgtgcggcttttgctctcacttttcgtgtagcattctctgtggccggcggggaatttcccgtaacgggccatctgcctaacagactgacaagaaagcggagtctgccttcaagtggttgtcttcgtccatccacatccacatcctcatcccagccagcatccacccgtctccctttcctttgtggcaagctgcctaactacccatccatgtgggcacacaaccgcagtgccctcgacttagcccatttggaggcactcaggcactgaatcccgtgtaggttgtcaggagtctgccaacctgggagctcgataccttggggagctcataccttgttggtatatcgctaggtaaggttgccagttagcagttgatacatatctctattaaggaataagcttggttttaaaaatgttaaattgctttggaaacatatttattttaaaatatttactgtatggtcagtttaacataacaaaaatttagctctacatttctaatcggttcaggaaagcggataaaagtagctgaaaaaagtgaaggcaagttgcttgtaacaaacaaatacaggatgtggttccctttaattcccacataatatccgaaagggtatttacaattcgggtatcgggctgagtgagtggtccaaagtttcttatttgccattcaatttgctttggtttctgtgtttctatgttacaggcgatccctgctcctcctgcctgggcatataaattgccgaaggagggaacagacagcaagtcctccgtcctgtcgtcctgtccaatgtcaattggttgtttgtgctattgccgctgattcttgggtagcccgggcatctcatgtttatctggatgtcgttagcatgagctgagccttctggggtcgtcgtccccagatcccctccttcattttggttacttctgttttcatttgcctcgttgttgttcttgttattattgttattatgacatcaatgggagcaacaggggctggctaacttaatcatcaccatgggcagaatgaacgttctccagggccatctgttgctcaaaggggtatatagggttactccaaagtagacccttcatcatcccaaccactcaccttggtaacgccgatttgagcccgatacaaaactctttaaaccgccaagagaaagtaataaaatttcgctttgctacggtaattgcagcccaaattaaatagacccacctcgcgcctaggaaaagttttctaataagagaaagtaacgcctaagcgacgttaaatttggaaagcaatttcgctgacttaagtgctttcgccagcgtcaattttaaaatgtttatttttgtcaaataccagatgaaggttaagcaagtttatgttctgagttgaattggaagatcttagtactggaaattccagggaaaatctggactatagacttcatcgctttacatttgcaaatgtcagctaaaccaggtgctgcatgcaactcattgtgttttgtgacatctaaatctgcgcctgatttatgtttgccagcaaacaactcaataaagccgaagtcagctgaaagtgacagagcatctggcacaaatgatgaaaagcgcacaaagcacacaggcaatgtcaaaggtcacacacatactcccaaccggtggaaaaccacccacatatgtcacgaccgattgttggatatgtttacaggcactttgatctcttactcgtcggtttcttcattaaaacgtcacctaaatttgactcatggcgggaaaacgaagaaaatgtcggggaaatttggtgggcgaaaggcacgtttgaagactcaaggcgacctgtcgcccagctaattatgaattccaaggactgtggggtcattaaaaattacccatcgcgaagaagaggagtatccttcctgcaaagaactcaattaacgctgctcctttctaaagtgcaacgtgtagcccgtaatggtggggaaatacatttgttttaattatgcttagtatgccaaacaaattcacctgatacctaggtaaaaaggttcagtactctacgggattagggaaaggtgaaagttgaatttattaatctgactcggaaacatggaggtaataccatactttaaaggtgaattgaaaaatgtacttgcacatgctgggatatgagttatttgtgaatgtattgaatatgaattgtgaatgttattttgtgaatgctgctataaaaccccattggccttgagttatttatattgatagctgtaaacgcaaattgtttcgataaaagaatgtgctctgtattcacaacttattcaattacaattcaagtgacgaattttcgtgcattcatggactgtggctgcagcttaggctttcactcgatttgcattcagcatattttccgagagctttcgaacaaaagaagcgattttccctcgttgccaggaatgtggtagctcctttttaattaattgctcgttgagcggtcgtctttgtttcgctctcagccaggcaattggaccaagttttcaccaactctggaagctaatgaatgcgcctgggactcgtgggaagtgggaacttttagctgaggtccgttcagcttggcaattactccaacttttacaattacaactcaataagtaggtgtttttatgacggtcagtgcggctcggttgggtctctttaattttcgacatttccgtcgaatgttttcccccaaaagccaactatgtgtttacggccttttaatgaatgaattattactcatacgacatggctgcgcagcggaattgtctaaacaaaaacatgaaaaaacataaatacgagatgtggtttttcagtggtttacagcgaaatctgaggaaaaacccacacgtgccgaccaaatagggggaacaacttgtggggctgcggccaattaaacggcaattaaaaattccagaaaaacatctcacgtttatttactgtgtgcaaacttttgtcatggtcagcggcatttcgttgaatccttggcgaaaggaaaagcggcgaaacaacaactacgtgattttactgggcaccatatccgagattgattcacttaacttggctggaaagtcaattaggggtaacaaattgctatttttatagccgttacacattgagtaaaagggtataatagattcgttgaatgacatgtaacaagtataagaaagcccagcaactggacttaaatgctgaaaatgatgcgaaaattatattattattatattatttttcaatggaaaattcactgatcaaaaactcagtattataaaaaacattttcccctgtggctgaaagttgtgcagctttacttgagaacaaagaagcgcaacatggaattacatagttatcccacatgacacgaaaccaggacacacgacacgtgactggtgtgtctattccaaagagaagtatctttttctgtcccatggaccacccactgtgcaccccccactccgcccactccacctgcatgtgacatggctcgcgtagcccgcatttagctggcgggttattatttacccgatacgattgtgggcccaaagatagtgttgttgttaatttcgcgcctcaacaagtgtaatttgttgtctttgcggcgacacccgcgccaaaggcaaaggtaactctttgttccgcactccgttcaccagtcgccattcaccagtcactagtcaccagtcacgctcatttgtcgaacatgcattcaatttgccgctatcggaatgttcagatcgcccctttgccgtgcatttcatgtgacaagccggagataagtaggtcctatgtgtttaccagggtaaatattgtttaaagggcatttgtggtgccagcatgaaggaaataatgaattaaacacaaaggtcattactgaaaattattatagaattatttaatgaagagctgcccatgaatggttttactattataccaaattaccatcacaagttggattatatagtactgtagataaggctatcataaatcgataacattaccagataggttcggaattaatccgtgtatttatttgatagtttttatgattgcaatcactgcttattttgccattttattatgtcaaacataaactgaaggtgaggagataatcacgtataatttgtactccattttcactgaaatttaggaccttgtaaacttgtgaacttgtaaatgcggtgaatgataagcaggaactaatgttggtaataacacataagtatggtatagttaagggtttctattcatatatagttcaccccaatgaaatgtttgtgcacgttagccgaccgagacgtttttgatagactgttcaaattagggtcaatttaactgccagtctaaaatccatagaactcattacgaaccctcgctatccagtcaaaagtaaaagcgctcaaaatgaacggtcaacatttcacggaactcggatattttcgataaattttaaatgaatctcgcgtttacttcgtcaatattggacagcctgatagaccgatgtatcaacaacggtgactcgatgattaactttcggggaataaacacaatttcgttttaaatttattaaattaccagccttgacctttcacccgtcccagaggtggtctctcgcccaccaatagtcagcacttcataactttatagctcacattcagggataagccactcaaaatcactcgaaaatcgaatatgcatgtttgacattcacaataattgaaatatcgagccagcagcttgaggaatcttctggctttgtcattagcatataaggatatatgtattccccaaatgtaggtatactatctgtctagtctacatttatcgcaatatgtcgaaagcatggtacctggtaattgaaccgacaaacttacttaaccttaaccttaaccttaaccttaacctatactgcccattactgaacactggttacacttgttgaggagaaaacttctgggaattgttgaccaccaattattattcaatttaaaaaggcagcacgttaatttctacgtgtcaaactatttatggtcgtttcattgccctttaattcccaacgggctcaactcgaggaaggtcaggtgcagttaattgaatttcccgaagtcgcaatcaatctgacgctgaagttccctctcgaaattcagtccgcacgtccggcagttttcctggaaattccattaaaacgccggctggcaaatacattaataattatcgagatatcatgaataattgaccgtctgcccggggctgcatattgcaatcaacaccatcgatgacctacgctggcgtagccatcggcttccagggatttctgccaaggatttttagcacccaggtgatttgcacattttgccttgagttgaaatttaaaattcaaaacctcaaaagccacactgcgtccgcaataatatgatatgcagccgcaacgtcatttcaaaaagaaaactcccaactggaaacgacgttttccccccgcaaaattgggtggttctactgggattggggcagatacgtgggatacgaccagcgagcaaaagggaaaagtttgccagagttggcaattggggtttaatggttagtcccaacccgaaggtaggccccaacctccccccttcttgtgcaccgctcattgctatgcaaattgctgtatttttctttaattttattttcaagcacaaaacccacctcctcatctacccaccccgcattttcccgttttcattcccagttttccgagggtggcctcgcccttgcgttgactaagtaatgctattatgtgtgcttgaccatacgggcattgcaggggatttgtggggagataggggacagtttagccaccgagtttgcatgccggacaggagctagtctcgaagctcggtcaggtaattgaagcgctttccaggagccgtgaaatcaggctcacaggacgaggattgggtgaaccgaacaggacctctcggccggattattagcctgagctctggcatcaatcagttgagacgttgagtgtgtgggatgtgcgccagctgccggatgctaaaacatatccggaatccagaggtgcggtctgtaatcttcagcttacaggctcatccaaccaaattgtccgattttcgacttggacttggagttggccatgtgggaatatgattcactgctcttttgtttaacttttaccgagctttccccattccttcccatcttggcattgttcagtttaggatcctaattgtttttttttttgtcctgattaaagctagctttacggggtttctgcttaactaaaaggtgagtctgtccctaaacttctagttaagtggaaaagttttactatgctataaaagctcaggagatttaacaaattaaataatactttgggtaccgtttccttgaacttaaccaatgtgaaatgccaagagaggtaaagaaggtttttctctggttatctgcttttagaaaatgcttcatatctatgctctatactcatagaaccatcttaattccattgattagcgtcctatttaaactagtgacgaactgaattcctccaactgttcaactttgtgatattgacctcctcaaaccgcacttgttggccaagtgcaaacggtgaccgcaagcgagtccagaccagaccagtccggaatgacatgaccgcagaccaagagtccggccttccggttgggcatacgtctaaccagctgtcttcggccatgtctctttcgctggccaccattttccgcctctggtcagagaagcccacttgatagttttgcaaaatcaatagacgcgtcgcataccccttcgcttggattagtaatgggtgcgggtgggtgagaacgggcgacgacgacgtggtggttgccattgaaatcaaacggcggatgtggttccgggcattggcaatacaacaaaattagcattgaatgccagggcaaccgagtgctggcggctctgggctgtgggcttcccattttccgagctcggagctttgccgttgttggtttaatagctgtcatatggggaaatgaggtcttcgccaagcactcacactcgtgcggatataatttggcgcggaatggaatcggaaatcgaggtggaaacgggcatagagttattggaatcccagttagctggcaatttgcgtgcaatttttcaaattagtcaggccggtgatgacgcatgttctttaatgattttaattaccctcgccctttttatggaaccctgaaaattagtattgcaagtatgcaattacaaaactctcactacacggagtctgcccgctaatctctctaatggcatcgcagcacgacccaaaacgtggcaatttgcacatttccaagggctccaaactattggcgtgcacacgcaacggaacccgatccccaatcccgcaatcccggagccaagaagttggccaagaagtcggatgaggagcgcaagcacatcaaagtcctgatgagtttcaaactgtgaattacgagggcgctgatgggagaaaggcgcccagcacgaaaggcgaacacttggcgccgaataacccagttaagaattttcctggaaagcgctttaattcaatttgcagtttgcgttcgcataataaactcaagtgcaggcaaatgcaaatgcagcttactggatttaatgaccttcaaacttaattgttacaaccaggcggcatggcaaccttgcaccatctgcgtttccatcctacttgcacatggtatgaccgtcgcccaagcaggatgcgtaggccatcatatgcggaatggtgctctgttcgtagactccggtgaacaggtgcgcccagggacccaacgcgtagacgggcacatcgtcgcctccgtgcgagtccatgtcgatggggacacccgagggaaactcatcgtcgtggtctcccttcaccaccgtggtgggatccttgcgctccatcgtctccgcgtcgtagaaattctcgtaactcggtccgttggcgtagcttagaaccatgtatggtttgccatcgtgtccatttactggggtctttccaaatacatcagatccacggtactgaaaggaaataatttatttataccacggctagactactgcacaacttgtgaattcaatttaaatttctctactttgtaacaagtttgaggttgccagtccttataacaagttccacctaaccagatagttcttaactcatgattcctgcacttaccgagtatcctgcgtaggtgaacacatgtgagtgatcggcggtgaccaccagcaaggtgtcatcctcgctggtcagctcctgggcagcggcgatggccttggagaactcaatagtttcattcagagccatacgcgcctggttgatgtggtgggcctggtcgatgcgaccgccctcgatgaagaggaagtagccctgctcgttctggctcatgtactcgatggccttgcgggtcatctgctccaaagtgggctggctgctctctgttgtggtctccatgaggtactgcagatggtcgtcgttgaagagaccgaggaggcgatccgttttggtgacatccacggcggccaactctgcggcggtggtcacatagacattattttcgcttgctgatttaaattcatcgataaggttaagtccatcggtacgcttgccccaggattccagactggagtcgacaaagtgcttgcgtccgccgcccatgatcaccttcagcttgctgcccacctcgccgcgggccagttgataggcaatgtcattgattccggagcctgctccacagtcggtagccacctccgcatcgttctcccagtcgcgctcagctatgtgggcgtacactccagaaggcgaggcgtgagtgacgcgggtggtggtcaccagacccgcccacttgcccgcctccatggcccacttggcaatggagtcgacgtgggtgctctcgtccagcatgaccttgcagtcggtgcggggcacctggccattcacgccaatagttccctcctgacctttcacgccacacaaataggcagtggccgtgcaggcggagtcgggcacaatcttatccacggaataggtcttcgagaggcccgtgaaggggaagttttcgaaggacagggacttctcctcgccgcccaagagattgcgagccgctgacgtggtggtcacacccattccatcgccgagaaagaggatcacattcttggcctggcgcttattcggttcagaagccaacttctgctggacaaactgcactccctgttggcgccagtaggcgttggtatcctcgccatcaaccacccggaatgccttgccatgtcgttccggttccggcatatccggatgcatcctgtgctccctgcactcctccggagtacggccgcattccggagcggaccaagcgggatgggctaccagcacgatggcgatcagtagtgcgttcaacaggcggaacatcttgcacaagactgaccctggctagtggttactccgactttggcctatcgagagattcggctcgaaccgattgcgataagattcgataaggcagagacgtgttgctcccataaacgcgaaatcgcatcaaatctaatacgccacctaattcccttagtccgaaccgtgcttttatttacgacggccagctacaaattttatagatttatagcacgtgagtatggggacttgttgccgaccgtgtggatcatcagtggttccattgaaatgtcccggaaaatggctctcacattgggccattggccatcacgtaatcaggctggaaaatctcgcggaggcacgtgaatgaatggcattataaccagttaacgaaggcaatggtatgtgggtgggtatgccgcatttcacatttatttggagccataaaaagcgggtcataaacaggtgactgttttcgcctggtggttttcccttttaatatcaagctgagaaatgcaaaggcattggaatggaagaaaggcagctgcctgccaaccgccggaaaggttaaagttgaccatggcaaaagaaagtgggggagtacgttggggtggcttgaccttggcttgaccttagtttgcacttggcagcaaggaaattagcaagcaaaaggaaaatgagtggcaagcagctaagctgcaactgttgaatacgcaaatcttaaagtttgccatcgtgtttggccacttgaacttatcgctatcgctcgcaaaaccgcattgaaggtaaacaaactctgaacttaattgctaagcataatagtaataaattctttaaagcaattataaattgaatcacctttgagcacatttataatgtaaatatttatgttcgtaaaatgtctaatcgggcgtatacgttatgtgctgcttatttacaaaatacgcttaaaaattgattggaaatggatgggcggggcaaaaatgccgcagcacaaagttgcgcatttaatgctgcctaataaatttagattcccgtttcgagtgtcaagattgtggccattttagccaagtcaatgacattaatcaatggggccaaggctctcgtcttgtgtgcagtcaattcccacttcacaccacaacccattttgttgtcctggatttaagattaatccctgcgccctaatctcttgcaggaaattcatcgatctgttcatcctggaggagagcagctacgagaaggatgtcagcttcaaggtgcacatcggagaacctcgattggcgccaggtgagttttggccacacggcggcaaaagatacgtacccaaagaacccagaaaccccatccgcaatccgaaagtcctccgaatcccacccacccgaaatgctaaccaattacgtgaaagcagcccggcatcagtgcaccgaagacggcacaagttcttatctgtcctgttgagaagttcaacctgcgacacccgggacaccaacacttcagcacccaaactcttagccccatatccccatttaccccgcccccaactccaaccccttctgactctttcgctttgaccccgaatattaaaaacaggtggaaaagcccagaaatgaacgagaacagaaaaaagaaacgaaaactttattaattggaaattccaatttgaattgaaccaaattgttacctggtttcgtatgtcatttcgcatcctatcgcctcatgggttcttttatactttttggtctttaatttgtgttctttatgcttctagattccactcactaccgtaagccttgaattgtgcattaattaattttatttgaattgaacacgaagcgtaagcgtagagcgctgaaatgtggaacgaaaaaggggaaaagcgaaaaatctctttcgggtttcggatttttgagagtaacattttctttctgctccatttgtttccttcaccgagtgcggaaaatgcgggcaaaaaagtgcaaattcattttattcgtttggttttggttaaccccgaaaattctgccatttcacgagaataagaattatacatatatataatttaattgcgtaatttttaggtgttgtgtatgtttcagccttagaagataccccttcctgtttatgttttctcttaaatatttatttccccattcccttctgtgtacaattatttgtttcctttggatatacctaccacatatattttttggcaatgggcagaaaatatatattttgtgttgtttctgtgatgcctcatcgaagttagagcaattagaaaaactcactcgcatctccgtagccccaaatcgaatgctagtcgtctcagtccacaaagatcagatcctatccacttaaatcccctactccgcagcaacaccacatcccaataggtcccccgtactaaccatcgacatttgcttgtgaccataacatgaactagattaaacattcctcatacttgtctctctaatccaatcaaaccactcgcctccgtaaatgacacatgatcgatcctcacgcagatgacactaataaggaatcatttttcaatcgattttttggtatgtaaacgtctgttcttttgccacatatttgcatattgcgtgatcgatcgaccatttcaagtgttcagttaatagtgaatatgccagtaaaggtgatcaatggagagagatgctagtaagcaactaaccaccattagcccactcgtcgtgtacataaaatatatcggtgtcgtattcataaatgtatctgaatgtttgggcattgagtatctgtgtttgtttgtgtatctgcatctgcatttatcccaaacaattgcgcttttttcgacgcagcagccacgcacttgataaatgcgagcttcaagcttctgtaaagtaatacttaaaaaatcaaagcaaacaaagcaccaagccaccaagcaagtaagccgggttcgtcttcaattgaaataaagttagaccaggtcacagtttttggtaatgttttggttatctctatgctcggcggacatttgtaaacgcgcttgtgcccgctcctcccacattgttgtgtgcctgtgccccgacttgctgctcgaattcgatccgatctgatccgatctgatatgatatgatatgatccgatcccgatttataccgatccatatcatcggtaccactcaaacatgcctctctgcatcgccaaatcgatttgtaagtaatacacgtaaccgctgatgagtaaccgatatttggcttttgtttccgtaatttgtgttctttcttgatttccgtttaccgtgtattatctgtgtgttctagacctaaggcaatatagtttaagtgtgaacggcttctgaactaagttaagtccatgtcgatgtattcagttctgtcttgtcaagtatctacatatatgtatatgtatctgtgtgctttgatcctctggagatttaaaaccaaagctaaatgtaacaacccgattaaagaccaaccaccacagtcatcgcatattggttaactgaatatttagaaagtgattgttgaagcaatatccaacatgttcgagaccttttaacaacgattctctgaactctacccccaaaaacacaccatccattctcgattcgccattgtcgatgtctgtagaaaaacacgaacattccggagaacccactcgtgagtcattcaaatggggggtcctaatgtcaagatgtgaccttttgcatgcctggttctgtcaatccttcaatccttaaacctgtcaatctgcaaatctgtcctttgcttatgtctctgtctgtctaatatgcagttattaaatttctattttccacccaattgcatcctgatggcactaacatacacatacatttcgcaagctcattgaagtaactggtctgaaacgttaagtgcttttaaagcgtttttattttcaagacgatatgtttggtccttcaatgagtttttgattttgctatcctccccttcggttgacttgacccctcttcaattaaagcccgcatcccattaccgccatatgtttctaattagtttcgaactaattggggcgtatgtgtgctttagtttgaagtgcatatatttatctatatatttgtaaaacccccgctttaatctctgttctttatctatttcccgtcaccacttcgtttgtatgccaccacaaactatgtctgtctagttataccctctattttactccatctaatcttaagatattccgttgtgggggtgtggctgcatgcaatacggtgtttactaatctaaatcataatcagttgattaactatttgatcacctccctggcagacgatgaattggcagccaaaatcaaggaggtcgagaaaaaacccgttcaggatctgaccgaactggatcgcatcctgctgctgagtaagccgagaaacggagaactgaccaccgcatatgtgcgcattcgagagagccaggaattcaaggtgagtggattacccttgattagattgcacttggattggccaccaagcatacatatacaatacatatatatgtatagcccaatagtttcaaaatgctaatgaaagacaatcacattcacttgacggccagtaaatcccagctcacatttacatccgcgcggtaaagtgaatgcgagacagtcacacccattatgaatcccaggtggaaagccacgtccttatccgagcgccatatcgagttaccgtaaagcgctcaggtgcacggcaaataagcacctaattgtgtgcaaatctccaaatgacacgttgagtgctctgtttgttttcggtctgtgtgtgcttattgtctgtcggtggcgtatacgtaatgtgagctgggtaaaagtttgccatcaatcctgtgttttgactttgccttgtctaaagggtgtttcatatcagttctttttgaaggtatataaggttgttagcttcagtttattatcattattcttttataaaatattcaggctacagtcgacaagctggtggcaaaagcgaacgtttctgccgtccttggcacttcatcgtggaaggaacagttcaaagatgccctcaccgttatcccaggtacaccaactcggttttttcaatttgcaatcaatccattttcatgacgcaaacaaacttttgcagccgatgaaagtgagtttgataacgatgatgaggaggaggaggtgcccagttgcttcagctacgtgagccacttcgtctgcctcttttggaaggttctctttgcatttgtgccgcccactggtaagtatccttttcctgtccaaggattcactctataaccatcgtcccgattgcagacatttgcggcggctatgttacctttgtggtatccatattcgtgattggcgtcatcactgccatcatcggagatgccgcctcctatttcggctgcgccctcaacatcaaggactcggtaacggccatcctgtttgtcgccctgggcacaagcataccaggtgagtgatccgaaaccgccggctgaaatgtaaccttcacaaacaccggactcccatctgccctccagatacattcgccagcatgattgccgccaagcatgacgagggtgccgataattgcatcggcaatgtcacgggcagcaatgcggtcaacgtgttcctgggcatcggcctggcctggaccatcgccgccgtctaccacagctcccatggcatgaccttcaacgtggagccgggaacgtgagtagtcctttagtacatttaatgtgcttgccttaaagttagtatttaaatatctttaaatgaaatacttatgttcttgaaacttgggcaagtagtagacggttagcagagtgaatttgttttttgagtaaatttaatttaagaaataagaaaataatttcagtattttaacttcagtttctaagtatagtatcccttattctaataaatttataattctagcattggattcgccgtggcgctcttctgcggcgaggccctgattgccataatgctcatcatgttccggcgctggcacaagggcattggcgccgagctgggcggtccgaaagtatcgaagtacatcagcgcagcgatcctggtattcctgtgggtgttctacgtggttatatgcatactggaagcctacgacgtcatccgggtttaaggagttcgcagccgcgttggtttggctttggcttgattattcgcaatggcgttggacttttccgtcaaattgaagaggatcgttacggcggaaaacagagctaaccgatacttagaagctattgaaagatgctgtagatgcagtttttatatgtaaacttatgaaattgatttatatatatatgtgctcggcgcgatatataaatatttcttgtgtaaaatttatgttaatactaaaagtaaaatttaaaagtttaactaggtttaagccaggcttatatacaaaccatttttacgattattgtctctattcatatatgaattgtaaatacagaaaggctgccacggctcagcaatcttgtaaccgtaacgagatcatttactgttatgccatatatacttaatttactttctaaagaatactattatatttattatatcattctgtgtataacttaagtcattgttgttgtttgttaaagctgtacttaatcgaccccataaaatcaaaacgggaaaatcggaatcgatttagagtttaaatcgtgttccgtactccaaactcgatattgtctctccatttgccgaaaaccattgttaatttaatacatgtgtaagttttaggaaagatctaaaggttttagccaagaagaaacgcagtccctctagccatctactacaaatactacaattataactactactactgattaggggcctccttgacaactagttctagtcacctcacactatcgacacaagtccaactagcaacactttcattaactctgaccaaagcaaaaggcggcactacttactagcgattagctgttagcgattagccagaaagaccatcagtgtgtccacactgcactatgaagaactacacgtactaccagtgagcactaatcaatttacttaaaaaaagactttctattcgcttacgtcgctggtatcgaagtagacaaaactggatattaaggcaaacaccaaaacaatagcgaaataataaggagaattactagaattgattgtaaaccaaatgtaacgagcaggtacatattttttgtataatgtactatttttcatataacaaaattgtagcaaattaatggtgagaagagaagcctaatgatatttatagccacatgcataaatttgtattatatatttggggtcacacaactgtacggggaactcgttgagaaaactgcgccaaatttagacgtaattgattattaattactgcatatacgaactattaaacaatttaataaatatacaaacatgaataaataataatgtactaagttatactgtcaacgtttactgctagatattataattaaatttctttttaaattta

SEQ ID NO: 32 - protein, 950 aa, Drosophila melanogaster
MQLLLKSIFTCALFVIFVYATAQSLLKVQETEARQAYLNVTSSSSSNLSQDDGHFLSRRLRQVSHGEEGDEGAPSQMDDELEQMTKVHGEAPDAEELRECSEGLVLPLWMPQRNISVGDRLVRGFVYFVLLIYLFVGVSIIADRFMAAIEAITSIERAVVVKGPNNTKQVMHVRIWNETVANLTLMALGSSAPEILLSVIEIYAKDFESGDLGPGTIVGSAAYNLFMIIAVCMIWIPAGEVRRIRHLRVFFVTALFSVFAYVWLWLILSVFTPGVILVWEAIVTLLFFPLTVLWAYIAERRLLVYKYMDKNYRVNKRGTVVAGEHDQVEMDAEKGPKQPMVTSARGNDAEAFDEARREYITLLTELRQKYPDADLEQLEMMAQEQVLARSSKSRAFYRIQATRKMVGSGNLMRKIQERAHSDLTEVKAQLHAGDDEEADDPIRMYFEPGHYTVMENCGEFEVRVVRRGDISTYASVEYETQDGTASAGTDFVGRKGLLSFPPGVDEQRFRIEVIDDDVFEEDECFYIRLFNPSEGVKLAVPMIATVMILDDDHAGIFAFTDSVFEITESVGRFELKVMRYSGARGTVIVPYWTENDTATESKDYEGARGELVFENNESEKFIDLFILEESSYEKDVSFKVHIGEPRLAPDDELAAKIKEVEKKPVQDLTELDRILLLSKPRNGELTTAYVRIRESQEFKATVDKLVAKANVSAVLGTSSWKEQFKDALTVIPADESEFDNDDEEEEVPSCFSYVSHFVCLFWKVLFAFVPPTDICGGYVTFVVSIFVIGVITAIIGDAASYFGCALNIKDSVTAILFVALGTSIPDTFASMIAAKHDEGADNCIGNVTGSNAVNVFLGIGLAWTIAAVYHSSHGMTFNVEPGTIGFAVALFCGEALIAIMLIMFRRWHKGIGAELGGPKVSKYISAAILVFLWVFYVVICILEAYDVIRV

SEQ ID NO: 33 - DNA, 3050 bp, Drosophila melanogaster
tcgattatttgttgcatatgttgtttacggcaattgtttatatttatttactgctggtgaagtgattattcgtgatggattttgacagtcccgaggagaaggagtttcccgggctgtacgcctccgaggcggcggacgctaagtcgaggaagagcaaggaggagagcgactgtgagtggagcgcaaagatgtgggcgtaagctgggaaaaaatcaatgggctcaccttgcctttacagttagtgaggatcacgaccatagcaagaaggacttgttgattggccggcgcaaggacaagaaggaaaagggcaaggatcgaggatacgccgctctggagggcgagagctcgccggaggaggagctggacaccaagtgggtgcaggtcagctgacccagagacaagtaatattttttcttttacttccagaagtccatccaagtcgaaaaagtcaaagacctttaagttcaccagctccaagagcaaggagaagcgggaaaagtcgcgggacaagtctgaaaaagactcgaagcacgcagaggaggagccttccgtctcccacaaggtcaaggagaaagagcgggataaggagaaggaccgtgatgagcccaagaagaaggacaaggaggagaagcgcaaggaaaaggacaagaaggctgacaagaaggacaaaaaggataagaagagcaagcagctgtcgcagcagcaggacgacgtctccgccgcggaggaagtgctggcacttgggtatcccgtctttggggtgtccgttagcttggcgaccgaacgatcccgctgccacgacggcgtggacattcccctggttgtgcgcgactgcatcgacttcctgcaggatcacctgaagtgtgagcagatctacaagattgagcccatcaagacgcgtctgatgcacttcaagcggttgtacaacaaccgggagcacgactccgccgttgatgagctcaacctgcctaccgcctgcagtctgctgaagctcttcctgcgcgaactgccggagccactgctgaccaccgatctggtggcccgctttgaggaggtagcctctcatccgaaggtaaccacgcagcaggcagagctgcagcagctgcttgaacaattgcccaagtgcaatcgcaccctcttggcgtgggtgctgctccacttcgacgcggtgatccagcaggaaagacacaataagctcaacgctcagtcgctggctatgctgctcagtccgacgctccagatgtctcaccgactaatggtggccctactctgccactgcaacaacttgttcgcggacgtccagctgataaagtgagcaaacaccggctagccggataacagtggtgggaaatatccaagtacctttgtgttggtaaaagagaagtccacatttaacaactatagttaaatcacaagaacgaatcgaagtcatagctctgaagttaactactaaactgttagttttagtaaactgttagtttccatatttatctaatgatataaattgtttttttatatgtataataggtacttataagaacccagataattcccaccactgttggcagttgataagattgctgctataaaaatcgccagatttagtcgtttattttgcaaccgacgatgagcacattaccccgtaaacagaagcgctttccacgtttcgccagttttctaatcaggcagaatggcacacatttaaacaaagttatcataatactaaattgtcatctcttaggtatgtgccccctttaacatcgaccagcccaaagcttccggatacgccggaggacatccagacggagttgcgcaagcaggacagcctcctgtcccagatccacagcgagatgaacgccgggttcattaccaagaaacgcgaggaacagctgtgggaagtgcagcgcatcattacccagctgaagcggaaactacgaacttttgagaagaaacaggaaaagactgcggaggaagtagacaacagcagcagtgctccgcccgctgtagccagtgaagataccactgactccaaaccagctggaactccagccgtatctacgaacaacagtatttcccaggaagagccaaaaaccgatacactaactccgaaagatgctcctaacgattttactattgatcccagcactggctttattttgctccccaaatcaaatccgcaccgcgaaaatttgctgcggctccaaattgaatatgacgagctaatggaatggcagaacgaactaaaagcacgtatcgtcgccgagcgcaacgaagtctataggctcaagcagctgtacgagcagcagtcaataaacagtcaaatggcctccttggcctcgggatctcaggctcccccagaatccgactatgagcggataatcgagcactatacacgggagaatgcgctgctggagcacaagaagaatatgctgggcatggaactaaaggaggaacgacgggcctgtattgctctacaagttgagctgcggctccagcagttttaatgtattaattcgattaatgtattacttggatgggtcaatttgagggatataactaagttcctattccggaaacttaatggtcacatttccaaagaaacataaaaggtctactaggcaatcataggaggtttcttagattcgtagaagacaattctatgtcacatatctaaaatattcaaatgaataaacttgtaaagtttttgataattcatttatctgcaaacgtagtcactgttctaaacagtgtcctttgtgaattgcaatatatgagaattttcagttcagcttttaaggagataaaatactgctaaaacataaaacggattcctcatgcctaaagtcagtttattgtttatttggaaatgagctagtttcagacttgacccaccgaaatatatgtatgtatatagggttaccaattttaaatctcaatgtctacttgcgatcaaatgctttgttcaaactataattactgttaaacggcgcaaagccccaaagaaatcttgttagacaactttactgctttcaacaattaaatgagaaaac

SEQ ID NO: 34 - protein, 625 aa, Drosophila melanogaster
MDFDSPEEKEFPGLYASEAADAKSRKSKEESDFSEDHDHSKKDLLIGRRKDKKEKGKDRGYAALEGESSPEEELDTKSPSKSKKSKTFKFTSSKSKEKREKSRDKSEKDSKHAEEEPSVSHKVKEKERDKEKDRDEPKKKDKEEKRKEKDKKADKKDKKDKKSKQLSQQQDDVSAAEEVLALGYPVFGVSVSLATERSRCHDGVDIPLVVRDCIDFLQDHLKCEQIYKIEPIKTRLMHFKRLYNNREHDSAVDELNLPTACSLLKLFLRELPEPLLTTDLVARFEEVASHPKVTTQQAELQQLLEQLPKCNRTLLAWVLLHFDAVIQQERHNKLNAQSLAMLLSPTLQMSHRLMVALLCHCNNLFADVQLIKYVPPLTSTSPKLPDTPEDIQTELRKQDSLLSQIHSEMNAGFITKKREEQLWEVQRIITQLKRKLRTFEKKQEKTAEEVDNSSSAPPAVASEDTTDSKPAGTPAVSTNNSISQEEPKTDTLTPKDAPNDFTIDPSTGFILLPKSNPHRENLLRLQIEYDELMEWQNELKARIVAERNEVYRLKQLYEQQSINSQMASLASGSQAPPESDYERIIEHYTRENALLEHKKNMLGMELKEERRACIALQVELRLQQF

SEQ ID NO: 35 - DNA, 17404 bp, Drosophila melanogaster
tttctcgtcgctccgaaaaaaggcaaaatagtaggcaacctgaaatccagagttgtagttggggactcttttggccaaaatacaaggaggagaaaaatagaaaataataaagggggcaccgccgttaacgcacacgcaaccgaagccataaaggggctaaacatataaatttgtgtagtaaaagtgaagaaagcgaaagaatcaaagtggaataatagcgagtgtttttcggtttgctagtgtgtttctgagtcggagtttgtgtgtgtgtgtttgtgtgattcctagtgtgtctgttgctgttgccaatgaaaatgcaaattgttggtaacaaatattggtaaaatgcggaggccgtaggaatttgtgcaatgcgagtgcgaagtgaaggagcccgaaactatgcagctaaaaacccgccatcctaccccgcatcgaatcaataataatacaataacccaaacgtattacacggataatggcagcataaaccagttaacatccgacagtgtttccgcctaaccatcgagcacctagctcatcccccctgccaccaacccttcgaaaaatccccatgatcagcgccggattgtggagcagtaactagcgaggcataccaggatgtcgcagccgcgcggagggcgtggcggtgggcgtggcggcggagtgggtcgcaaaaccccctcctcgctgaccggcccaccggatgagtcggctacgcccagcgaacgggctacgcccgccagcaaagcagactccgatcccaaggacgatagctcgagcaatggcgacaagaaggatatggatctttttccagccccaaagccgccgagtgccggcgcctccattcgggacacggcgaacaaggtgctcggattggccatgaaaagcgagtggacgcccatcgaggcggagctcaagaagctggaaaagtatgtggccaatgtgggcgaggatggcaatcacataccgctggccggcgttcacgacatggtgagtactgtacagtgaagtgccgcgaggcgggctttccggctcatttgcctcgttttgtaaaatcaattgcgagccaaagcgggaataggaagcgaaataaatacaggaacaggtccaacactcagcgaaaaatatggtaaattaaatgtatacctagagaaggattatcaatagttttaataaggttattgaaatctttaaaactataatttctatggatcttttagttgtatttatttgaaaaatttccttaagtttttgtgtaatatttccctgagtgtatgcgatgtagaaacgtcgcccttatcaacgtcggcggcattttcccatttctggttgtttaccagccaaaataacgacacaggaactggaggccagaaaacagagcacaccatggtttggccaaaaaacagaggctagcaaggaaaagcgcccaaaaaaaaaaaaaacagagaacagcgaatgttatttgatagctcggcccaaatgttttggctgccaaggcgatggctttggtggcattcggttttgtagctccaagttcctgaagcgtcctgccacaagttgcgccgtatacgctttggggttagccccccgtccgaccgataaactcataaaacatcgaagaattgaagcgcttcgatttcaatttaccataaacgctatgaaacggagaagtcgttgacataaaattaacgttgcaccgctaatgaaatgcggggaggtgtgcggcgaaagggttgaaacttcctggcagggtttttcttttacttttttcctttcctttttttttttgtgtggtactatatatcccaactagatgtgcaggttgtctgctagactagacttacgacgagacggtatttgcataaatatagcttggagttgagctatttttgccttgattatttccgctttcccagaacgggggtctttattcggttcttgacttgatgggcttgctcttgatttcgttttaattacgagccaacgagcttataatatcacatccagcttattagccgaaggattctaatgcaataaagatgaatttaaatggccaagttgcttttcaatgaggtcagcgggttggaaggagagtaccatgtattggtactatgttattgtgtttaaaatgtgcatatattaatattgtattattcttaccttaagcttaagtaatccccatacatttccattgcagaataccggcatgacgccgctgatgtacgcaacgaaggacaataagacggccataatggatcgcatgattgagctgggcgccgatgtgggagcccgcaataatgtgagtcttgagcgggaatagggcaggaataatttaaagcaccttagccaactccccacggtgttggtgccaaatatagaagcggcccagctgtttaagccaacggcggcagcaaaagccgctaaaaatgtgtcaaatcaataaaaaccgcataattaaatcttgagcgggggcgttggtgggtaaactcgtgcacccacttctacgcacgattctcacacgccgcccaccacggtcaatacttcaattcggcaatacctccctgccgcaatgggtcaacttggcaggacttggccaatgggtagttcgcttcatttgactccagttgagtcaagttttccagcacgaatgggaatttcctcaagaaaaagaaatactaacacattgcttttattttcattttataactgctaacaaaaaattataaactcttatttatagaaaactaaattattattgggcacccctcgtttttaagtggcttaaagttcgaacttaactttggtttttaaagaaacagcaagtattactcataataatgtaactcaacaaaagagttttcccaaagagtagagatgtaaggtcatcgctgatgactatcctgatttccccagtaatttaccatcgtgattatggccaattcttttttttttttgatgtcagcaagtgaagtgagccaggttggcatcgcccattaggccaagttgctaacaattggtcgaattcgccgaccagcttgctttgcatgccgcaattacttagcacatttcatttgaagtcgctttcttggctgcccattcacatgtccttacgtatacgcaacgtactttatttcggtgctagcggcgataaaaatccttgacctaattacaaaataattgttgccaaaccagtgcagacatggcgaattgaattaccaaaacaaacacagaaagttcaattttcccttcctccttgaaaatgtttctcctaaaagattaaagagtgtgtagggaaaatgttaaaggtaaatttgcacatgaaagtcataaaacattaactagccgggagttacaagctaagcatgaaaataaaacactcgataagactttatatgagtataagaatttattttcgttttaacaggacattcattacacaaattttgccaatgatacttggtgttttaaaatattgagaaaatgttgtccaaactgcaactaaaaaccacatatatattaattaattatatttaatataaactttccctttttgcaacacaattaattatgataattattcattttaaaactgttccatttggatgattgttccctcttgttgttcagctaattaaatattatgatatcattttcgtgagtttatacaaagcgcacctttttgaaaaccattacctcatctgtataattactcttttgtttttataaaacaaatgtcacttcgtgaccaaatcggataatttcccttacactgaccaaatgaattaaaaactgagaaatgtttattgcatttacaattcgcaacttatctaactgtcaggtctggtccaaagtaatacccaaacaacacgacaggaccaggacctttatggccattataaaggatactcgtatgatgtaacgccgtggtaattaacatttttaacttttcaactgcaaggtggcagactgcttttttttcggcactcgacttggaggcgtgctcgcaacacctctttgcaacgtaaaagccaattaatcaagcacatgactccgatgtacgcccagttggccaaaaactccatttgacctttcgagtgtggcccaaaccggagacctcgacgtcggccccgacttccgctacatttttatggccagcggcgtcattaatatgcaattttaattaaattcaagtggaattcttcacgcagtgacccctgcatatgtgtgtggcgatgacagcgtgaactaaaatgaggaataaaaacgccaattcatttgtcaagttgcctcagtgcgtgagtgaagtaatctgccccatccacgcaaaaaaaaagcaaattaattcacttcattagaaagtggtgcacatgcaagaaggtggagggattaagccaaatgagcaccgtaatgaggacttgcaattattccaaagaaggtgtgtgacatcgccagaaaatgacttcatggcttccacgcgactatccccgagtatctctgggccgtaaaaacaaaacacccacgaaactgggtcgacttcgtacacccttatacacccaaccttatcccttttccatttggcagggcaaaaatgtgctggaaaatttgcgcttccgttttggttttgtttccggtttttcctttcgaccagccaagcaaacgcaaacacaagcgcacaaacacacaagactcgaaaacgaactcgaacctggctcaaaagtatgcaaaacagcgcgtgaaatattatctgtctaccttggacgccaatgcaaccccaaaccagcagcgattccgcccaccgcgccaagtggctgaaagtttactttgctttttctttagggccaacacgtcttggatgggctttctggacatgtgtcaaagccgtcgactccgagcgccaacttgcgttgtatgcaaattagcagcagctgcggccagaaatagtcgcaaataaaccgcagggaactcgaatttcacacggcacgaagcccacacacactgacttaagtgggaaagtttgaaatacccatttggattctaggaattgtaaaaaatcatgtgcaagaacacatagaatgtataaatatagaattattttaaatggcataacttctggtattctcctaattttttaacatataatctaaactaagtattattttcctttcactatttttattaactagaaattcgtatccttttatgttgaattttgtagactctgtctgcacttaccaacctgatgacagggccaaaagcacccatacatatatgctaaaccagttcacttccgttttcggggctaagaactgtggggaggcttagttataaattagagccatggtccgaggtccgagcatacggggcgtatgtgtaacacgttgcgttatggcttattatataaggcaataaatatggccaaatgcccccgattcatatgtgactcacttggctattagctggcgttaaactaagcactccatgtcagacgttatcttaaagcacttttcgttacgtttcggtgatttgctcagggtcatattttcctagccgcattgttttatatttcttttcgggttttcctggtcgccattgatgcagtttttgcatgtgagtttgcggctgggctgtggccattaagaaaaccccgtccgtaagtgaaagtccgcatgcaagattgtggcttaagtaatcaaccactcccttttgccccgttagccgcatgcaaaaccgactgactttgacccattgaactgacccagctcttttggtgtgggggcgtcagtttcctgccaatgaattgcaattgatttcctccgttcttctcttctcttctctttcaggataattataatgtgctacatattgccgcaatgtattcgcgtgaggatgtcgtcaaattgttgctaacaaaacgcggcgtggatcccttctccaccggtggcgtgagtattccaatagctttatatactacatatatacgtatgcgccccaagaaagtgttaccccaatagttgaggtagcgacacgtcaggcgacacactcaatactcgagttcctactttcgagtcaatgaaatagctgcataccttggggctgctgtcagcccgattcgcaggcaatttgcggctattagacgcatacttcacctggctacgaaagagaagaaaaaaaaaaaaacctatccaaaggtcagagccatgcgaagatgcaactttgaggctcgcatgttgcatgttactttggcgggaccagcaattaactggcgacaaggttaagatggtaatgtctagggcccgcttaagaacactttaagacctgaaaacaaatttaaagtaaccctaggtttcacgaaaaactttactcatcagattaaacagaaatttaagcttagataccgtcattaaaattaaaatttaacattttgcatgatttccaagtctgacttctgtttaaatactacaatgtataaatattaaagtctgagcaagattagtgacaccatctttatattgtctaaaatcataaagcgttaaccatttaatacaatgcattttctcataggtaacatttttaacaaaatatatgatgatcacatcgtcaagcattttggcaattatttctccaagtttatttctcgtgtcggcattaatttgcttttctttatttttttctcggccgcattgggttttcgagacttggttatttagggggcgtgcgccttgcccaaattactgatggttatcagaagagagctctaagcacgtgtgggagcgagagaagtggagctgcggaagcgagacagacagatgcaaacttttgttttagcaacagccaagtttgaagtgttccgttagcgtgtgtgcgtggcaaaaaggactcccacatccacaaccgacacctgccccccatgttgcctacacctgctgctcgaccacccctcccccaccatcacctatatacacctctctcgctcactcccgcagcggttgtcggtgggagttctttattatgcttttttcgggctgtcaatctgtgatatgagcgggagaggccaaaaaagaaaaatgacacgaaatgtgcttataaacgcaaaaacgagccacttgcctattcagtagcaaatggaattttgaagcgaatagggaaacagtttgccagttttttaggtgccaacattaaccacacagtagtgcacatagctgcatattaattttggctagaaaaaaagtgtaaccccagcaataagtgcgtttgcagtgtgtgcatagtttaatcgaagacttaattggatttttttcccttttcagtcgcgttcgcaaactgcggtgcatttggtgtccagtcgacaaaccggaactgcaactaatatcctgcgcgctctgctcgcggcagctggcaaggatattcgcttgaaagcggacggcgtaagtgttaccatgtgtgcttgtgattgagtgtgccagtgtggctgtgtgtgtgcgacggagagccacaagtgttggccgcccaattgatgccgctttatctccactagtttatgatagctaagccacccaaatgcaagccgatgtgaagtcaagtactctcgacagcggtgccaggcggtgccgacgtaaacaaagacttaataaaaatcaccaaaaaatatatacattacaataatggcaccaacaaaatcgagaggagttagtaacataaagcaaacaaaattgtgtggaaaaatcgatatgcaaaactgctcgcggtaaatgcatttcgactggctgtaaatcagaaaaggcccaaaaaagttaatgcggctattacacagcgaggaattgaataggtaatttttgagtcaattttagcttataatttgtggtacttttatgaatttttttaaaatttttatttcaaattattagagagctaatatatttgaattatgcttatataacttaaaatactcaaaatttatagacagcaataaagtatgggatctgcaacacatctttttctacactgtatcaataagtagctctcaccacagtgggtaggctccagcgagctttgaattaccatcgaagcagttgtctccgcctgatgaacttgctggggctaaccgagctccagatccctttttcgagctccccccttggaaatctgaacagaaatgcggaactatttgtcgcatcacgtgccccgggtgaaaatgcacaggcgatatttccattacgcacgcgaagaaagcgcataaatttccaacgaattgctatcaagcgattgtaaggatttggggtatatgggggctgattgagggaatcccgggtgccaccgattgattgtctagacaaaatgggtaacccacctcgatttgtgcctcgagggctgcggcaaatggcaaacagcaacttgatttaaatcaattagagagaggtggaatggcactgtcaggcgaaattagtcggatgaagtatttagctttcgatggcattcagttcgattcgtttcgattcgcttttcttttttttttctacacgcatttccggtgtgcatatacatgcaaatatatatattgtatgtgtgtggatagtactgtagttttcccccgcgagggcgctcaactcgttgccaacaacaaacaaatataacaaagcgaggaaaactctaccgaaaaaagggggtcaagtcgctgtacaacttgatttactcgcctttcctggcagatagggataatggctccccgtcacgcccccctcttacgactcgcccccaaaaggtagttggttgcaagttggagcgccaaagttgcgaacttggctaaaaatagcgaaacatgttgccgttaacacttgaggctcgaattggctaattggatatttatgattatatgttcgcgagtgtgaatggatgtgtgttcgctgtccttatcttaattatattttatactatatataacctatctctaacctagcgtggcaaaataccattgctcctggccgtggagtcgggcaaccagtccatgtgcagggagctcctggctgcacaaacagcagagcagctcaaggtaagtaatctgtgaactagcagataagtttacccacttattttaaaacctaaaagtctagttgcagcttatattgatttaaatagaaacactgaatacatcatctagttaataaccaaaaatgtcaacagtatgagccattaaaagcataaaatgctaatttcttataccatctacgcatctaactgatttcctaactaggaccaagaaattgttgattttataatcgccacgatagtgtcaatcaaactgtccatctgagctgtcggaaaatgtccacaaggttcttaaagccttgaactgtccaataaccaagcgtgtaaataaatcaaaaatgcaaatttaccctgctcacctgtgcgtacaggtgcattgcaagtgcaacagtgcgcgacattggcaaagtttgtgcaattttcaatcagaagttgaagtgcaacacaccaagagcagtgcgtgttgattaaattaaccaaagggctacggctcgcttcaggccaagggttcaagcccaagttaaagttaaagttgcgcctgactttggccgctggctgagcacgcaatcagccggcaaaacagccgtaaactgggtcaaaactgaggcgaaaacgcagctaagatgggaagggaatctgatttgcatagcccaaaataaaatgtcgaaagtgaaatgcagcaacactaaggaaaaatttaagtaaattatttaaaaatatttaaacaatgaagctatgaagctctagcaaagataccaatttagttagggaatatcattataatttgtcacatagttaattaatttcaagcataggagcaattatgactttgcaattatataaaaacatttttgtgaagtgcaccctttcatgttaaattttggatttattttttcgcaggcaacgacggccaatggagacacggccttgcatttggccgccagacggcgggacgtggacatggtccgcatcctggttgattacggaacgaatgtggacacgcagaatggggagggccagacgccacttcatatcgcggccgccgaaggcgatgaggctctactcaagtacttctatggcgtgcgcgcctcagcgtccattgcggacaatcaaggtgagtctgtgggaatgtggagcaaggaaaagcatgttgcaaatcgtgtttgaccttgatataacacaataaaaatcatgaaattttcacttctcaatagaagctagtgattataaagtggaggtataaagtatatgtttgtggcgcccccggttggaccgagctccagacatacgaatgtccgtcttgatgattaaaatttatatatatatatatgtaataccctatagatcgcactccgatgcacttggccgccgagaatgggcacgcgcacgtcatcgagatactggccgacaagttcaaggcgagcatcttcgagcgcaccaaggatggcagcacgctgatgcacattgcgtcactcaacggtcatgctgagtgcgccacgatgctcttcaagaagggcgtctacctccatatgcccaacaaggatggagcccggagtattcacaccgccgccgcctatggtcacacgggaatcatcaacaccctgctacagaagggcgagaaagtggatgtgaccaccaatgtaggtgggataatgtattaagggataatcgtattaattccacactctttgcaggataactatacagcactgcacatagccgtggaatcggctaagcccgccgttgtggaaaccctgctgggatttggagcagatgtccatgtccgtggcggaaaactacgtgagaccccgctgcacattgcggcacgagtgaaggatggagataggtgtgccctcatgttgctgaagtcgggagccagtccaaatttgaccacggatgactgtctgacccccgtgcatgtggcggctcgtcatggcaatctggccacgttgatgcaactcctcgaggacgaaggagatccgctgtacaaatcgaatgtgagtagattattagaatagaatgataaacgcttgaattaaaacttccattttatagactggagagacaccgctgcacatggcctgtcgtgcttgccacccggatattgtgcgtcatctcatcgagacggtgaaggagaaacacggtccggataaggccaccacctatataaactcggtaaacgaggacggcgccacggcgttgcattacacctgccaaatcaccaaggaggaggttaagattcccgaatccgacaagcagatcgttcggatgctcctcgaaaatggtgcggatgtcacgttgcaaacgaaaactgccttggagaccgctttccactactgcgccgtggccggcaacaatgatgtgctgatggagatgatctcacatatgaatcccacagacatccaaaaggccatgaaccggcaatcatcggtgggctggactccactgctgattgcttgccatcgagggcacatggagctggtcaataatctactggcgaatcacgctcgagtggatgtcttcgatacggaaggacgatctgccttgcatttggctgctgagcgaggatacctgcatgtgtgtgatgccctgctgaccaataaggcttttattaactccaagtcccgcgtgggacgcactgcactacatctggcagccatgaatggatttacgcatctggtgaaattcctgatcaaggatcacaatgcagttatcgatattctaacgttgagaaagcaaacgccgctccatttggcggcagccagcgggcagatggaagtctgtcagctgctcctcgagctgggcgccaatatcgatgcgacggacgatctgggccagaagccaatccacgtcgccgcccagaacaactactctgaagtggccaaactcttcctgcagcagcatccatccctggtgaatgccaccagcaaggatggaaacacatgtgcccacattgccgccatgcagggatccgtcaaggtgatcgaggagctgatgaagttcgatcgatcgggtgtgatttcggcgcggaataaacttacggatgccacgccccttcagctggccgccgagggcggacatgcggatgtggtgaaggctcttgtgagagctggtgcctcctgcaccgaagagaacaaggcgggattcaccgccgttcatctggcggcacagaatggacatggtcaggtcttggatgtgctgaaaagcacaaactcactaaggatcaatagcaaaaagttgggtctgacgccgcttcatgtggctgcctattacggacaggcggataccgtgcgggaattgctgaccagtgttcccgccaccgtcaagtcggaaactccaacgggacaaagtttatttggggatctgggcacggagtccggaatgacaccactacacttggcggccttttccggcaacgagaacgtggtgcgactgctcctcaactctgcgggtgttcaagtggatgcggcgaccatcgagaacgtaagattacctgcatatctcttctgttcagaaaccattaacacaacaattgattctacagggctataatccactccatttggcttgcttcggtggtcacatgtcagtggtcggtttgctcctaagtcggtcggcggaactcctccaatcgcaggatcgtaacggcaggacgggcctgcatatcgccgccatgcatggccacatccagatggtggagattctgctcggccagggcgcggagatcaacgcaaccgatcggaacggttggacgccactgcattgtgctgccaaagctggccacttggaggtggtgaagttgctgtgcgaggcgggtgcctcgccaaaatcggagaccaactacggttgcgccgccatttggttcgccgcctccgagggacacaacgaggtcctgcggtatctgatgaacaaggagcacgacacctacggcctgatggaggacaagcgattcgtgtacaacctgatggtggtgtccaagaaccacaacaacaagcccattcaggagtttgtcctggtatcaccagcacccgtggatacagccgccaaactgtccaacatctacatagtactctcgacaaaggtgatttagctaaaggatctctatgcacttaactaaactaactaactaaaacattttgatctctttaggaaaaagagcgcgccaaggatctggtagcagctggcaaacagtgcgaggcaatggccacggagctcttggccctggcagctgggtcagattccgccggaaagatccttcaagccaccgataagcgaaacgtggagtttctcgacgttctcattgaaaatgagcagaaggaagtgattgcccacacggtagttcagcgatacttgcaagtgtgtgatattattgactagcttagatcttaacttattgagattctgatatgtatccttcttcctacttttaggaactctggcatggctccctgacgtgggcatcctggaaaatccttctgctgctcgtggccttcatagtctgcccaccagtgtggattggattcacattcccgatgggtcacaagttcaacaaggtgcccatcatcaagttcatgtcgtacctaacctctcacatttacctcatgatccacctgagcatcgtgggcataacgcccatttacccagtgctccgattgagtttggtgccctactggtacgaggtgggtcttctcatctggctgagtggattgctccttttcgagctgacgaatccgtcagataaatcgggactgggatcgataaaggtgctcgtgctgctgctcggcatggccggagtgggtgtccatgtctcagcatttctattcgtctccaaggagtactggccaactttggtgtattgtcgaaatcagtgcttcgcgttggccttcctgctggcctgtgtgcagatcctcgactttttgtccttccaccacctattcggtccctgggccatcatcattggggatctgctgaaggatctggctcggtttttggccgtcctggccatctttgtgtttggcttttccatgcacattgtggccctgaatcagagctttgccaatttctcaccggaggatctgcgcagcttcgagaagaagaaccgaaatagaggctacttcagtgacggtaagtcgaaacgtttgctttgctttctccagtctacttttcgaatttttgtttcgaactttttgttttcatttggaatgtttttgcaaacttcctcttttgaacgttcaatgtgtcttgataagtatctgtgtctgccttgaatgaaaagccatctaatcaatgtgcgctcgatgtttcacataagtaaaataaagcaaaaaagaaccaactacaaccacataatacaacaattgcatgctcaacaagtacaaacaacccgaacctccaaccttgatgtcgtaatccccgtccacccctccaccaaaagacctccactaataatgttctccctctgatcttaacccccaactgaatatcttaactgaattatccgaatggaacagatgacatgcccacaccccgacctccgccggtggagaattatgtcgatagtcgcttcagcgaattccgacgaaagcacaaggacgaccgtaagtctcctaccatccacaactaccaacccttactacccccgcatttgcatggcccccctttccgggggctgccccgcccccttaacccaacaatgccggaatccaaaccgttgcgttgccgccttcgatgttgtgcgtaaagtgttaatgtcgtttgttttctagttccctggaggaacatccacaagtccgcactcgctgctcgaaatcccctcgccttgctagtttcagttactttcgttttgaggcatgttcgcgggaaaatcccttttccgcatcctcgatgttgtggatctgtgtttatataggtatccatgcgccaagctttattacttagtttggagtatcgttttatacctttgcttggatcaattttaatttatatgtatttctttatgtatttttaagtgacatataaatacaaataaattattaagaatcagaatttaaaaccataatttattctcattaaattcaatcattattatttcaaaaaatcctagatctgtgtccgatattattttctttactatatttgttattctttttttaagttagattttttatcgatgtgtaaccagagcgatatccattagaactctgtacaaactaaaaattccagtaatgcatgttgatgtttttatccagtcaatccaaaccaaaatcaaacaatcaatcagcaatatcgatataaccaatgcccgcctgcctggggctttcagcttgcgccgcttgcccaccaccaaattctgcacaatcgaaacaatcgagaccgatcgaatcgaatcgataacgaaaaacgataacgctactgataccgattaccgatgctcgtattcgtgagtcattcgaaccgctcagctgcgaactgcgagatgctgcttttgacgtgtttaaccactcacccgcactctccaaaatccaaataaacccacccataaatatactcgtttatgtaaacttcaaaataaccaacaaataccaagtattaaactcgcacacacgcctgtgccaagccgacaatatatatacgtatatatacgctagctgcagcaatcgcaatgcaatagttcagttatctgattgtgagtaacgttccgttcggacccatgttaggacccatgacgccctttctggctttcgagcgcctcttcttcgcggtcttcggacagacgaccaccctggacatcaatcccatgcgacacttgcgtcccgagtggaccgaggtgctcttcaaatttgtctttggcatctacttgttggtgtctgtggttgtactcattaacctgctaattgccatgatgtcggatacttatcagcgcattcaggtttgtattgccaaggccactaatcagtattttctctctgctttccctcttcccccgtttatttgtttcaattttcatttaccggaatgctatttgtttgtgctttgattgtaacaaccccaaaactgaccgctccaaattgaaacacaattgggcatgaaccgaaactgggggttggtcgatcggacaaatcaacgaaacaaaaaaaaaaaaaaaaaccacataatcgaatcaaccaacccaacctgggcgtccgttatctttttatttttcaaaataatttccacgccggccaatatatgcgtgctgtccgggggtgtctatttgtatctgtatctgtatctggaaatgtatctatgggtctccgacacagtgcgcatgcatccgattaactcgttcgagttgttgttcttcgccgtgttcggacaaacgacgaccgagcaaacgcaagttgacaaaatcaaaaatgtagccacgcccactcaaccgtattgggttgagtacctgttcaaaattgtctttggcatttacatgttggtgtcggtggttgtgctcattaacctgctgattgctatgatgtcagacacctatcaacgcattcaggtagtattgctaaatgcgcttttatctaactcgactctatttattaactcgtactttaaccataagtatataaatttcatattgcattgtgtattaatcattctctatttcagcataagaagtaaatttacatatgaagatgatttatatttcttagatatataatagcggtagttaggaagtgagctgttttgggaacatattgagaaaatagttaattaatctggagaacttggcatgctctgtaaatccatcaactgcccagacttgcatcttccaggttttttcaggaaaataatgttagcaatctgagggatacaattttgtgaaagtgtatctcaaagatggaagcctgccgccttctagtgtagtacagtgcagagtagctttagtggattagccgccttgaagtgtgccctgcttttgtgaccagtgttgagcgaggccaaaccagaaagtgttggttaacgcatgcttacaaaaccttatatatagaaatcgttgctgcatgcttatatgtctgtgtttgtcattgtctaggacttaagtctgaagagatacaccaatatggtggttaggttttgtatggtaattttgtgattgccatccaaaacaggcctctgaatttgtgtatttctattattaacaacctgatttttgcagctcttaagttacgtattaacaaagtaaaaacctgtaaaatccgaggcttctgttcacgaaactcatcccgtttattcctttgttcttgttctctcctatatcatgtctcatccatccaacatcgcgcacctcgctaaccaataataaactgaacaaaaaaaaaaa

SEQ ID NO: 36 - protein, 1619 aa, Drosophila melanogaster
MSQPRGGRGGGRGGGVGRKTPSSLTGPPDESATPSERATPASKADSDPKDDSSSNGDKKDMDLFPAPKPPSAGASIRDTANKVLGLAMKSEWTPIEAELKKLEKYVANVGEDGNHIPLAGVHDMNTGMTPLMYATKDNKTAIMDRMIELGADVGARNNDNYNVLHIAAMYSREDVVKLLLTKRGVDPFSTGGSRSQTAVHLVSSRQTGTATNILRALLAAAGKDIRLKADGRGKIPLLLAVESGNQSMCRELLAAQTAEQLKATTANGDTALHLAARRRDVDMVRILVDYGTNVDTQNGEGQTPLHIAAAEGDEALLKYFYGVRASASIADNQDRTPMHLAAENGHAHVIEILADKFKASIFERTKDGSTLMHIASLNGHAECATMLFKKGVYLHMPNKDGARSIHTAAAYGHTGIINTLLQKGEKVDVTTNDNYTALHIAVESAKPAVVETLLGFGADVHVRGGKLRETPLHIAARVKDGDRCALMLLKSGASPNLTTDDCLTPVHVAARHGNLATLMQLLEDEGDPLYKSNTGETPLHMACRACHPDIVRHLIETVKEKHGPDKATTYINSVNEDGATALHYTCQITKEEVKIPESDKQIVRMLLENGADVTLQTKTALETAFHYCAVAGNNDVLMEMISHMNPTDIQKAMNRQSSVGWTPLLIACHRGHMELVNNLLANHARVDVFDTEGRSALHLAAERGYLHVCDALLTNKAFINSKSRVGRTALHLAAMNGFTHLVKFLIKDHNAVIDILTLRKQTPLHLAAASGQMEVCQLLLELGANIDATDDLGQKPIHVAAQNNYSEVAKLFLQQHPSLVNATSKDGNTCAHIAAMQGSVKVIEELMKFDRSGVISARNKLTDATPLQLAAEGGHADVVKALVRAGASCTEENKAGFTAVHLAAQNGHGQVLDVLKSTNSLRINSKKLGLTPLHVAAYYGQADTVRELLTSVPATVKSETPTGQSLFGDLGTESGMTPLHLAAFSGNENVVRLLLNSAGVQVDAATIENGYNPLHLACFGGHMSVVGLLLSRSAELLQSQDRNGRTGLHIAAMHGHIQMVEILLGQGAEINATDRNGWTPLHCAAKAGHLEVVKLLCEAGASPKSETNYGCAAIWFAASEGHNEVLRYLMNKEHDTYGLMEDKRFVYNLMVVSKNHNNKPIQEFVLVSPAPVDTAAKLSNIYIVLSTKEKERAKDLVAAGKQCEAMATELLALAAGSDSAGKILQATDKRNVEFLDVLIENEQKEVIAHTVVQRYLQELWHGSLTWASWKILLLLVAFIVCPPVWIGFTFPMGHKFNKVPIIKFMSYLTSHIYLMIHLSIVGITPIYPVLRLSLVPYWYEVGLLIWLSGLLLFELTNPSDKSGLGSIKVLVLLLGMAGVGVHVSAFLFVSKEYWPTLVYCRNQCFALAFLLACVQILDFLSFHHLFGPWAIIIGDLLKDLARFLAVLAIFVFGFSMHIVALNQSFANFSPEDLRSFEKKNRNRGYFSDVRMHPINSFELLFFAVFGQTTTEQTQVDKIKNVATPTQPYWVEYLFKIVFGIYMLVSVVVLINLLIAMMSDTYQRIQVVLLNALLSNSTLFINSYFNHKYINFILHCVLIILYFSIRSKFTYEDDLYFLDI

SEQ ID NO: 37 - DNA, 11587 bp, Drosophila melanogaster
ctcgagaatacgcaaattacgataaatagcacgaaaaaccggagaccgcaaatacgggcgtaaagtcgtcaagtcgcaaagtgtgtcgtaaaacgttggaaaaaataatacacattatttgcaaaaaaaaattagacaaattttataatattttattatttaataaaaaatcaaacggcacaagaataataacatacatacatatataaaaaggaagcaaagcaactctgtgtgataaagcagtttaaattattaaaagcaaaagccggcaaaaaatcaacaaatatgttgaagaaaattgtaaagaattcagtttaaatccgaatataatattttaaagagcattaaacaaacaagtcccaaaatagtagaactaatgcaaatacaaacatatcaaataatgggcaacaaataggcaaacgataaagaaaataccaacaaaagcgggaaagaaagtccgaaacctttgagagcatatatttggcaagaattggctaaaatccgtgcagcagcattaccaattggtctcggcccgaaaatgcttttgagcaatcagccggcgaatacgaaaccgcagcaaacgccttcgccgtcgcagacgcagaacttcaagtcgaagctgcagcagcagattgtttcggcagcggcggcggcagcggcgaacatagccaacggcagcagccatcatcatcatcatcagaaccatcatcatcaccatccgctgaacaaccatcataatcacaatcacaatcagcacaacatttccttcgccacggatttctcaattgcggcgattatggcgcgcggcggaaacgccccaagcagccgcgaaccttcggaacgcagtctgagtgagtaaagtaattcccgcactaaaatatcaggcctacatcgcaaactagactcaagagctgttcaaaaatagccaatgcattttagggcttcattttcgattgggtttcagaacaataagtatcttgatatcgttagtttgcatgaaacgagcttaaaaaccaatcttcatttgagtcccatcgcttcattcatgaacgtatgtttcttatgattcttgaattcatattcagctccttactacaaacaagtttcactctattaacatattcaatattccattctttcgattgagactaataaattggccagtcaaagtttgaaaagattttaactctggcatatctagcatgttgatgtttatcccaagttacgggcttgtctgctgatttaactataaatatttacgatccaggattaaaatatgaaaggcttgataaatgattgaaaataatcaagctgtgacgaagagccaattatcacatttatgtattatttatgtgaattttttaattcagatttcagatacaagattaggaaagtacactcaaaatcgaaatagaactcgataaaatcacacataagagcagaaacaaaatgcattgccagaaaaatatatgtgtagcaaattggctttgaatacttgagacttgatgaagaacaaaagcaaattagtaggttagtgtgctagcaagaaaattgaaatgtagttgatatttctatatatttctagaaacacgtaaagcagttaggaaaatatataaacatatttcattggctttggtaaagagtcatgtaatcgattgcttagtaatattcacttgctttattacccacctcttgaaaaactgtcgcagctgcattacatttctatattttccacattttttgctgccctttttgtgcaatataaattatatattgatgacaatgcaacgttgatgacttgataattgcagcaaatgcgcggcaataaaataatcaaagcctatttgaatgcgccaaaggggttgggaaatgcacatgacaggcgcagagcagatacatatatatgtataatcgcatttgtatatacactctgaatgcaaaactatttagatgccataattgggcagagacaaaagcgcaaacagatgcattcattagtgtgaaaaccgaccccccccccaccatcgtgcacaccattctctttcaattggcaattttcattggcaatgccagcacacaaatacacacgaaattaacatatgaaattgcattttgagcaaataattgaatttctggcgtaatctgtaaaatgcatctggtcgcgaactggattctcgttggcattgctgttgcgactcgtcatcgacaacatgcaacatgttgcagcccagcagcaactcccacattaacgagccacgctgatgtctctcttttctaagtgcactgaaagaatatgctcttctaatatgacaacaaacaattagcacttatgtctgttaagaaatgatatacttaaatacacattctttactgttagaaattcgtaggaatcttttttataaacttataagctctaagtatcattatatttaatattaattatttttggttacttgtatcaaacattaatttttaatgattgtgttttgtagttgcaagtagttgtttttccataattgggacttagttactgacgcattctgccccccattcatttctggtcgtgtaggtcccgcatctgtggagcgctattcaggccaggatgcggacgatgatgttgacgttgatgtggtcgactgcagtgactcggaaatgccgtcggcaactgcggcagcagcagcggcggcaacaacagcagcggctgcagcggcagcattgcaggcgcagcaacaagcgcgtcaggcattgcgtgttgcacagcaacaacagcagcagcagcaacaacaaaggcagcagacacatcaccacgcaacaactggcaagcaacaacgccaacatcacaatcatcacagcagcaacaccaacaacagcagcaactcaggcaacagcaacaccaacagcaaatcaagcagccagcgagggcgttctgctgccgcagtgggagccgctgccacgccctcgccaccgccgcccccgccctcgcaaagtccggaggaactcgaacgcctgtcgccagaggaatcaccagcccaggtaaagctgcacagagacataaatcctttttgcttctagaaaaagtggctagcaaaaagtattattagcaaaatttataaaataagatataggtacaaaaaatttgatataggattatttcctatcttatatattatattatcttatataatagattttatatatagtagatatgattttctttgtgtgtatgcatcaccaactaagtgtggcgaaagaaatatgcatctcctcgagcgtcctactaaaatcgcctcctaattctctactccttctttttcatctctcttggcaatgccacgcccacagcagcccacgcccaagatagtgggctcgtgcaactgcgacgatctcacgcccgtccagtgccacctggagaccaaggagctgtgggataagttccatgaattgggcactgaaatgatcattaccaaatcgggcaggtgagtgcagtgccattgccatggcggcaacaaatgcataaattaaggggtttacacctaagtgagtaggctggaaaaaccaggggtttccattgatgcagtcatgaatgatttttagcagagatgcaagcgcagatatatgcctactttattctatttaaaaggggatattctatatatacagagtgagcttatctgaagtatactgtatattatatgagatttaagttgaatttccttttttaaatgttctcactttcttatttgttgatctttcaaaactcacttcaatcaatccaccaaccaatcaagttagacatttgaaaactccacttatcgacatagccagttattgaaagaaatttcccgataatcgatcacatttcgtttatagccccggcaacttgcattttatttcattaagcgcattcgttggaattcaatttgccggcggtgttggtgaggcggagtgctgggaggagtggattggcatggggcagtccgggtcataaccataatgccgcccccggcagttggccaccaatcgagcccacgaaaagtcctcgaacgaaacacaatcaataaaaactttaatgcgcctttcacccatggaaagccaaatgcccaacttccagctcatgttggctgtaagctagcggccacgccccgtttacgccccatgccgtcttaactggaaatatcaacagcttttcggttagttcctcatttacatcaagacatttttttgtcgttgtattttttttttttttttgattgacaaggctttgaagtaatttgcgtcgattttcgattagcagaaaaacaaaagacaaccatttcgtcagctgttttagctcaaacattaaacatacatacatacgtacgcccaaaaaacacaaacacgcatactcacataagaaaccgaattaaacgacttttcattcgcaactcagtcaaagttgaaggaattattgctcgacgatatgttcgaatgttgtggcgaagttttcagggggtgggggggttctttaaaaggaaacatgaacgtgaaacataaccgtttggggcaaggaacttttgttttatttttttgcccttttttctctctcccagaaaacatgcgaaatgcgcattagtcgctaggtggtagttaggatctcccttcctttgtttgttgatttttttggggcctttttctggttggtttatttcgggtatgatggaatttcgcaatgaaatgatacacacacatctgtgaatggagtatgtattgtgcagaatgtatattcccttttcacttttgtttttataatttgtttaatttttttgtagggtactttaaagtctacccagtgctagtttttctttttatatttctgctactgtttctttgctttttgcctggcaacttttgtttattatttggctttgttgatgcttaaccctttggcggccgtcaacaggcggctctgcaccgccccgctccctgcatttacgacacattaacaaatttactcctttcggttgccccgcattttgggtacccccatccggggatccacaccaagtataaattgcattgtaatagctgccgattgtcgcgctaacaacgcatttgcatgtcctttggctttcgggacaatcgctcctttggcttcgtgtttttgcgtttttgtatttgttttttttatgctgttgctgttttttttttcggccctgtaattagtcaaaggataccgatgaacggccaacacttatttacatttgtgcgggtttgacgaacgcgtgcaacacaattgcaaaacggaggccagaaaaaaaagccacaaattcgatggaaaaacagtagccgaagcagtggcagaataattcccattcccagcgatatccatctatgtcagcacatcgtttgctagctaaacatgtccacgaaaggggcgggccaggtggctaagtgggtgtggcaatgcgggacttttttatgtgaatgatacattttaaattgcaaaatatacgactggggctttggctcgatggcatgactcgctgcagtctgtcatggcggatataatttgacaacggtaaacatgtagaaacagatccattgtccgcacttatcaatatttcaaatgaaagcacaaaaacatagaaatagggaaagattacttaacaaagatggtaaaaaaaaaggttacccaccaatcctatatacacattcttaaagttattctacgaatatttaagcaattcaaaactaacaattatacatcaaggaactaagtatcagcttatttccttatgaagttgtgatcactccattggttgcatctgttctttccattataacccgcaatttttcagacaattcgctttggcagctgtgaaaatgttgctgccacatgcaaatgcgcatgcgtggcactcatcagaaggaaaccgtgaaaagcggccaagaagtgccgcgaattgccagcacatacgaaatcgagaaaaaaaaaacgaaaagacttttcagatgatttacaagcaggggcaacgttgaaaaggcgtcaaagtcagagcgttcgaattttttacctgttacgtggtcaggttgggatggttctctttgtttgtgcggttgccgagataaaatatcacgtggtttgcgattttgtcacgctgtcagcggttttgaggttggcatttttccaaagacaaagccggaaaagtccgcagacgggctaattgtttgttgacccatcgcaaaatacccagagtttgtcaatattttgcgacaaacgcttcacgcctattagcccgagctcttttccgccgcaggacattcgaggacagtagcctgagctgcaaggatgcgttcaaattgcaatttccatggtgcaaccccttgcaggtcaagatattttcgccgctctggcatttttttttttttttggtaaacagtgtccacaacttcattaatatttgtgggcaacagctgaaatgctcagcagatagcagatagatcggaaacaagttaatccccagttgcagtaaaacgggcagggtatgagttatgaattaatcaaataataaaagatagcgaacggagggagtgtgttgtcagctggcgataagatcaaagttatagtctataacttgtctttttcgggggttgctttttagtttcgctttgttcacctactcgctggctaatttgcattttattaatttagaccttgaggcttaatttgctgtaacaaaggtgttgataatgaattgccattcctacatgtttcagcttatatgtataccatactaattgaaagccgagcgaccccatggcaaatggtgtgtaaacttcataattgtaacctttggcacctttggctctttggctgcggtccgaaaaaccgagtgagagccatttccctaattttcccataaacaaatacataaaatccacacttagaagctcggccagcgggcgaactaaactaaaccgtcgaaaccccccacgaaagcgaaatagcaaacttggcattggctgggggagtggctattgctttagctgccctcgggcggctcttcaactcgtaaaatgtatgtaaatgctggaatatgatttacgacatttccgcctagcagcagaaacaccacaaacacacaaaaaacaaaaaaaaaaataatggaaacgtgggggcgcgccattagatatggcccatcaaaacggggcgtggcagttgctcggctttcacacatttatggattacattagcaggtcggtcaagccatcagcaaagtgttaacattttactcgaaactgagaaaaatatttgccaaaactcctaagtaaaagtgtaattggccaagtgtctaaaaatatattgatttatgaagttatcaacccttttgaagaaaaatgtaatgaataaaaatcgactattgtttcttgtgcttaagaataccttgagaagtattatgcccagtgcattatgtgtagcatgagcttcttatggaaattctttccattcgtttcggggttagaaacaaaatgggagcttccggtttggcggcttccgttctcgagttttggcggtcaagcttgactgcagttagtcagtcagttgaagtcggtttgtgggtccgtgcagatatcgagataagcgaaacacgttaagtgcccgctacaatggtgctaattgtggcatgcaactgcgagtgcaacagaaagagcttacagcacaaatcacaattacaacttgtgattcccggattcgttttggcctggtaactgcgataaatacgcggccacagaaacaatcatggtgacactgtgcccgcccattacaataatgggctgtaaacacagctcgaacaaacaagagttgtacgttatgcatactgacatatgtgggttgaaattcaggagaaatgggaaaaaattggactggaaagaagtcttcaatcgggacctacaaacctatacaggtacaaattgtatttgcgtgcctgacaattaaagtccttttgcatttgaaatgctcgtattaacacatttgttattgaataaatgtatcttaagataatacggcgaggtttgcaaagacgccttatgaaaatatcagtcgtttagtttcaagtttcttgatcgccagtaaaccaatttgttaaacaaacaattagaattatgcaacccagactatcggctttactatttgattcatggtaggcgttctttctgcaagacaaatgacaaaaaactgggctgggtcattagcgtcatttacacttacctgcgaccacaaacacgattttctgcgggtggtgggtggtaagtgggtgggtcggcggtacacaccccgttccgcccacccgctgggcgaacgtcctgcgttcaggacgacgacatcgctttcggaaatgtgtcaaaaacgtgctaaaagtcataaaattaaatatgcgtcttatttacataccttgctagctcaccacctacttgttttttttttgtgtttttgccgccacaacacaatggcgggcaataaaaaaatagttcatgatttttcgtgtttttcttgtgtgtgttttcgtgacttcactagtattttccgaagactttggtgcaacataaaatgtactccatccaatacaatactattaaattattttcattaagatttccttaatttgttaaatgttttataaatttcagacgcatgtttcccaccgttcgagtgagtttctcgggtcctttgcggcaaattcagccagctgaccgatatgccgtacttttggatgtggtaccacttgattcgcggcgataccgttacgcctaccatcgcagttcgtggctggtagccggaaaggcggatccgccgccaccctcccgcatttacgcccatccggattgtcctctgagtccggaggcactgcgaaaacaggtcgtctccttcgaaaaggtgaagttgacaaacaacgagatggacaagagcggacaggtgagtcgaagcgtctcaatttatggagttcagattttaagaagccagaacaaagccagaatagagttatagttagaatggatcgatacgttttaacagtttttaaaattttaacaaataaccctcaagctttagttagttaaccttcaactttcaaggattaaaagtaattctccgaaaaaatgctgctaagttagcttctactcttttatagcccgaacctgaatcatctcagtcttgaataatttaggctgcaagacaaactcataaactggcggcccgtcttgccattgtcttgcgattcggcggggtcagccagggttgccaacgaacgcgagtgcacatatgcaaatggcattgcgcgcgcacaaaaatgaatgaaaattgttggcaatttggtggcaaatacgagccgtctcagaatcctgttggcatatatatttctggggattttcgagcctgctaccgtttttatcacggccataaaggcggtggatgtgagtgaaggagtggagtaaaaagacgctgcgaggacagtcaaaacaaacgtcgactacttttttatggacgtacatttattattgagccgtgtgtgcgctccaaacaaacaacaacaaacaatccgcattcagggaatttttcttctccaaaaacccactttttgcaggtcgtgctgaactcaatgcaccgctaccagcccaggatccacttggtccggttgagccatggccagagcatacccggcagtcccaaggagctgcaggatatggaccataaaaccttcgttttcccggagaccgtattcacggccgtgacggcctatcagaatcaattgattacgaaactgaaaatcgattcgaatccgtttgcgaagggatttcgcgattcgtcgcgtctcagtgactttgataggtaagtttttctcccttctagtcttgcccgatttccattcctctagtccatagttgcccccgtttcggttttttatggggtcatgtctgatttatggcctgatttacgatgtcctgttgagccgtaaagccgatacagtagcccaacttgccgctgattagcgaaaatgtgtgaaagtgccagtctgcgaagcgattcctgcaggttcttcatcttcaattagcgtgcaacgtgcaacaccggcaatcaatcggatcgaacttatatgattatatgaccgatgtcggtgtgtgatttcgatacacatttcatttaagagcctttaaggaaagtagggcaatttgaagtgctaccacctttggaatttatttagtagaaataaacggtgataagaaaaacctaaaatttccaaaaatatataaatgatatattcttcacgtagtcgaaattgcttgcaacatttctgcggatcagcaacatttgagtgtcttgtagcaacatgttgccctactcccgacaggatctcgccaaaggcaattcttttgcagcattttggaggactgctgcccttttttcggacagcgacttcaaagtgttgcaaggcggcgactattaagacggcaaatgccctgccgccagcagcaacacgggcgcagcagcagcaacaacagcagcaacaacaacagcagcggcagcaacaccaaaagcaatgttgctgttgtagccggcacggcggcggcttaagtggcgtaaattacagatcggcgcttttaactttgatgccgattcgtacatgaaatgaaaacacgaaaataatgagtgaatgtggctcttgttgctgttgttgctggctttgttgttcctgttgtttagtgtcggcaattggcagttactttcgacgtaattatgttattgctccggctgaagtggcagcagcaacaagttgctcatcgggttctgacactccaggtttcctcaagtcaagctcgaacttccccaaccgaaacttaatagagtggcaatggctttaaaagagcaaactctgtcattgtttcgactgattagaggcacgaattcaaaagaatcatttaattattattatttattatttaatcatttaattatttttgtgcaacatttccagggatcccatggatgcgttcttcttcgaccagcacatgcgtactgctcccctgcgattctttcccgatccgctgatgtcccaattgactcctcaggaggcagatgccgcatcaatggcgctgttggagaaagcccgccagcacttgcagatgtttggacgatcgccgtacacggagatgttgctgccacatctgtatcagcgatcggcggcaccgccgccgcccccaccggccccccacctcagcgcctttcagctgggaatgtggcagcagcagtggccccaactcaccgccggattcctggccagcgccaatcagcaggcggccttggccttggcagcagcgggcgccaatcgaacgccaccaccttcgatggcggtggcgccaccagctcctgccacgcccacctcctcgtgcggttccgcctctccggatctgagggccagaccccaactgaatcattatcctcagcggttcagtccgtatcaggtgccccagcatcaggcatcgccaccagcctccaatcgagcagaaagtccataggatacagctaccaacgaaaacaactaaaccaccc

SEQ ID NO: 38 - protein, 660 aa, Drosophila melanogaster
MLLSNQPANTKPQQTPSPSQTQNFKSKLQQQIVSAAAAAAANIANGSSHHHHHQNHHHHHPLNNHHNHNHNQHNISFATDFSIAAIMARGGNAPSSREPSERSLSPASVERYSGQDADDDVDVDVVDCSDSEMPSATAAAAAAATTAAAAAAALQAQQQARQALRVAQQQQQQQQQQRQQTHHHATTGKQQRQHHNHHSSNTNNSSNSGNSNTNSKSSSQRGRSAAAVGAAATPSPPPPPPSQSPEELERLSPEESPAQQPTPKIVGSCNCDDLTPVQCHLETKELWDKFHELGTEMIITKSGRRMFPTVRVSFSGPLRQIQPADRYAVLLDVVPLDSRRYRYAYHRSSWLVAGKADPPPPSRIYAHPDCPLSPEALRKQVVSFEKVKLTNNEMDKSGQVVLNSMHRYQPRIHLVRLSHGQSIPGSPKELQDMDHKTFVFPETVFTAVTAYQNQLITKLKIDSNPFAKGFRDSSRLSDFDRDPMDAFFFDQHMRTAPLRFFPDPLMSQLTPQEADAASMALLEKARQHLQMFGRSPYTEMLLPHLYQRSAAPPPPPPAPHLSAFQLGMWQQQWPQLTAGFLASANQQAALALAAAGANRTPPPSMAVAPPAPATPTSSCGSASPDLRARPQLNHYPQRFSPYQVPQHQASPPASNRAESP

SEQ ID NO: 39 - DNA, 4116 bp, Drosophila melanogaster
ccggaaagttatcgattagtctctgaaaccatcgcaacaaattcgattacacgttccagcgtcggccgcgttttcctgctgcaagatacttcattttcaaatttgtgcattttccgttcgttataaaaagtcaggtgagttgcgctgctatctacgagcattaggaaaacttgtagaaaaagttgaaataactgattaagtgccgaacaatagaggcggcactgtttcactcaaaatcgaaataacccccctgcctgtattagtgtaaagtcgctgtaaatattgaattaaaatcgccatattgtgcaatttttggctccttatcaaatcgtttaaagtgcgtcgactggattagctaagcgttgcgattgattaaactagtattagccgcgccatttgcctccacgcccataaacaaacgccgacaaactcacttcgttttcctcgtccgctttagtacagtcgcttgagtggaaagcgatgtgcgtgtgtgtgagtgagacgtagaggagactgcgagagagagagagagcgcgttagagaaactcgtttagcttctgtttttgagcgttttgtgcgtttcccctctttcgtgttcggttctgtttggaattttatcagggcgcaaaaataacataccctacaccgaacgaaaaagttcaaatataagtattgcatataaaacgcgtttagaaggcacgcaattgtgttattcaacttttcttcaagtgttgtgtcctaaagaggtcagtcacaaaaatctcacgtgttattctgcacatttcatttgtcttgcagcgtgaacatgtcgagcaaatcccgacgtgctggcaccgccacgccgcagcccggcaacacctccaccccccggccgccatcggcgggtccgcagccgccgccgccgtccactcactcgcagacggcctccagccccctcagccccacccggcactcgcgcgtggccgagaaggtggagctgcagaacctgaacgatcgcctggccacctacattgaccgggtgcgcaacctggagacggagaactcccgcctcaccatcgaggtgcagaccaccagggacacggtcacacgcgagaccaccaacatcaagaacatcttcgaggccgagctgctggagacgcgccgtctgctcgatgacacagctagggatcgcgctcgtgccgagatcgatatcaagcgtctctgggaggagaacgaggagctcaagaacaagctggacaagaagaccaaggagtgcaccactgctgagggtaagtgcgtggaaactgaatcgataagaaaaccttataattgtagggcaaagaaagtagagtaatgataaaattaaaagtaagaagagacaaaaggcgtggtttcaagcaagaacgaaacattcatttagttgctgaactgtatataatgattatcccatgatattcctcactttctgtgacaaaatcatccctattctggcatttaacgaacattaattgattgattatcccaacccgcaggcaatgtccgcatgtacgagtcgcgcgccaacgagctgaacaacaaatacaaccaggccaacgccgatcggaagaagcttaacgaagacctgaatgaggcgctaaaggagctggagagactgcgtaagcagttcgaggaaacgcggaagaacctggaacaggagacactgtcgcgcgttgacctggagaacaccattcagagtctgcgcgaggagctctcgttcaaggatcagatccattcgcaggagatcaatgagtcgcgccgcatcaaacagacagagtatagcgagatcgacggtcgcctcagctccgagtacgatgccaagttgaagcagtcgctgcaggagctgcgcgcccagtacgaggagcagatgcagattaatcgcgatgaaatccagtccctctacgaggacaagatccaacgactgcaagaggccgccgcacgcacatccaattccacgcacaagtccatcgaggagctgcgctccactcgtgtgcgtatcgatgcgctcaacgccaatatcaacgaactggagcaagccaatgccgacctcaatgcgcggatccgtgatctggagcgccagctggacaacgatcgcgaacgccacggtcaagagatagaccttctcgagaaggagctcattcggctgcgcgaagagatgacgcaacagctcaaggagtaccaggaccttatggacatcaaggttagctttaatacttgtctaaaatcgtgtacgtattaatacataaatctaattatcctgcttaggtctccctggatttggaaatcgccgcatacgacaagctgctggtgggcgaggaggctcgtttgaacatcaccccagccaccaacacggccacagtgcagtcctttagccagtcgctgcgcaactccacgcgagccacgccatcgcgtcgcactccctctgctgccgtgaagcgcaaacgcgccgtggtcgacgagtcggaggatcacagcgtcgccgattactatgtgtccgccagtgccaagggcaacgtggagatcaaggagatcgatcccgagggcaagttcgtaaggctgttcaacaagggcagcgaggaggtggccatcggtggctggcagctgcagcggctaatcaacgagaaaggtccttcgaccacttacaagttccatcgatcggtgaggatcgagccaaatggcgtgatcaccgtttggtcggcggacaccaaggcctcgcacgagccgccatcgagccttgtgatgaagtcacagaagtgggtctccgccgacaacactaggacgattttgctgaactccgagggcgaggccgtggccaatctggatcgcatcaagcgcattgtgtcccaacacacatcctcctcccggctgagtcgtcgtcgcagcgtgaccgccgtggacggcaatgagcagctctaccaccagcagggcgatcctcagcagtcaaacgagaagtgcgccattatgtaaaatcaaacgcagcacaacacaactctttcctctttgctgaacaagacaaacaaaataagcacacacgaagatcataatttagaacccaaaaacacacacaccgaggtacagagatttattattcagctaagttattttttgtggccgcagcgccaattatttaatcaaaaacatttgtgtagaagacatcctgaatcttcgtttcgtttgtacactttcgttttccctttcttaacaaattctatagtttattgtttcgatgtttttgtatttccgcgttaactaatctattgtaaactttatttggtataaactggagaggcatgttgcctcttttttatgccacatagaatttacgtaagacgttcacttcttgtattcgcggcggcaagaactttgaaaatattgcaagaaaaacaatattttcgatgtacttacgctccacctacatatttagtaaattagtttttaagctatatcccagataaaccagtcgacgtcagcaaacaacaacaaaaaaaaaacaacgagcacgtagtgagtgatttataagatacaggtcaagaggattaactaaagaaaacaaacgctcctgacaacagacatatttatttaagtattttttgtacaatcaacataaaatacattatacattatacatacatatacatacatacattatatatatagactcatgcctacggaagtgacaaccagccagcaatatatatttttagccatggccatagggtttacgatccaccaaaacggctttctcccggtttagaccggttcttgagcttcctgcagacattttaccggacgagcaacaataagaacagcaacaacaacaacagcattaacagcaacaacacaaatgtacaacaattacaaaagcaacaaagaagaaaaacgaaagaaaatggaagtacacgtagcggctcagcgatccgtcgcattttttatgggtgggcgtggtcgcgttttacgccggccaaacaaatgcaacgcccacacagactattatacaaaaactgatgaatacaactaaattttaagtacatctacgtttatgtatgtaattgctaataatttgataattaaaaaataaagaaaccatgtttaataaaaatt

SEQ ID NO: 40 - protein, 622 aa, Drosophila melanogaster
MSSKSRRAGTATPQPGNTSTPRPPSAGPQPPPPSTHSQTASSPLSPTRHSRVAEKVELQNLNDRLATYIDRVRNLETENSRLTIEVQTTRDTVTRETTNIKNIFEAELLETRRLLDDTARDRARAEIDIKRLWEENEELKNKLDKKTKECTTAEGNVRMYESRANELNNKYNQANADRKKLNEDLNEALKELERLRKQFEETRKNLEQETLSRVDLENTIQSLREELSFKDQIHSQEINESRRIKQTEYSEIDGRLSSEYDAKLKQSLQELRAQYEEQMQINRDEIQSLYEDKIQRLQEAAARTSNSTHKSIEELRSTRVRIDALNANINELEQANADLNARIRDLERQLDNDRERHGQEIDLLEKELIRLREEMTQQLKEYQDLMDIKVSLDLEIAAYDKLLVGEEARLNITPATNTATVQSFSQSLRNSTRATPSRRTPSAAVKRKRAVVDESEDHSVADYYVSASAKGNVEIKEIDPEGKFVRLFNKGSEEVAIGGWQLQRLINEKGPSTTYKFHRSVRIEPNGVITVWSADTKASHEPPSSLVMKSQKWVSADNTRTILLNSEGEAVANLDRIKRIVSQHTSSSRLSRRRSVTAVDGNEQLYHQQGDPQQSNEKCAIM

SEQ ID NO: 41 - DNA, 3921 bp, Drosophila melanogaster
agtaggcgtgcgaagcgctccaagactgggtgcttccgttgcgtgaaaataaattgtgaagaagaaagacggcactttgtatctgctcgttttgaattttttttttctgtggcagtctgtgtgcgtctgtagatatagatttgtacatatgcagttgggaagtgaacacgaaatggctgctgcatttagaaaattcaattagtttcgagtgtgttgaggtaaacgaaaaaatgcgcctttgtccagttgtcatctatgcatttataatcatcatcgggtttctggaggggattatagcccttggtggcgacgatcgcaatgaaatcacagtgggtaggtccctccattaattacttagtgatagcaatagctcaacgttttgccctcgaaggtgccattttctacgagaacgagaaggagatcgagctcagcttcgatcaggcctttcgcgaggtcaacaatatgaagttctcggagctgcgattcgtgaccatcaaacgctatatgcccaccaacgacagtttccttttgcagcagattagtaagtaaatacgctcggatgcggcagaaccaagttacgagaaattcatcttccgtgtgtagcatgtgaactgatttccaatggcgttgcggctattttcggaccaagttcaaaggcagccagtggtaagaaaagcacacacacacacacacactgtgtgtggacatggcccaaaacatatgttcgcgatgtgacggttcccccctttcgtggcagatattgttgcgcaaatcgcgaacgcgaccggcattccacacattgagtacgatttgaagctggaggccacgcgtcaggagcagctcaaccaccagatgtccatcaatgtggcaccctccttgtcagtactctcgcgtgcctacttcgagatcatcaaatccaactatgagtggcgcaccttcactctgatctatgagactccggagggtaagtagtgcctggataccccgtagagatatggactacatttgaagtccttaggcctggcgcgcctgcaggatctgatgaacatccaagcgctgaacagtgactatgtcaagctgcgaaatttggcagactatgcggatgactatcggatattgtggaaggagacagacgagactttccacgagcagcgcatcattttggactgtgagccgaagacccttaaggagctgcttaaagtatccatagactttaagttgcagggcccgtttagggtaattcttcatttatgaaagcgagaaagtacttactaagtcgctttatctttagaactggtttctcacccatctggatacgcataactcgggtctgagggatatttataatgaggacttcaaggccaacattacgtcggtgcgattgaaagtggtcgacgcgaatccattcgagagaaagaagacccggctcaccaaagtggatgtaagtggaggcccaactgactgtaaccttggatctaatctagcgtacttcgcagcaaatattggggaaccaaaccatgttgcccattctcatctacgacgctgtcgtcctgtttgccagttctgcccgaaatgttattgctgccatgcagccctttcatccacccaatcgccattgcggcagttcgtctccttggatgctgggagcatttatagtcaacgagatgaagaccatttccgaggatgatgtggaaccgcactttaagaccgaaaatatgaagcttgacgagtatgggcagcgcatccacttcaacctggagatctacaagccaacggtgaacgaaccaatgatggtctggacaccagacaatgggataaagaagcgtctcctcaacttggaactggaaagtgccggcaccacccaggatttctcggagcagcgtaaagtgtatacagtggttacccactacgaggagccctacttcatgatgaagttggttttgaagcagtaatctggtttttagcagactacaacctttccttatttcctttagggaggatcacgagaacttcagaggcagggaaaagtacgagggctatgccgtggatctcattagcaagctttccgagctcatggagttcgattacgagttcatgatcgttaatggcaatggcaaatacaatccggagacgaagcaatgggatggcattatacggaaactgatagaccacgtaggtttcaccagaagtatagtagtaactccacttgatatttgtatcttttatacacagcatgcccaaatcggcgtctgcgatctgaccatcacccaaatgcgacgttctgtggtggacttcacggtgcccttcatgcagttgggcattagcattctgcactacaagagtcctccggagccgaagaatcagtttgccttcttggaaccgtttgccgtcgaagtctggatctatatgatctttgcccagttgataatgactttggcttttgttttcatagccaggtgggattaggttaacgctcttgagtgaagcttaatttacttttcttacagactttcgtatcgcgaatggttgccacctaatcccgccattcaggatccagatgagctggaaaatatctggaatgtgaacaactcgacttggctgatggtgggctccatcatgcaacagggctgcgacattctgcctaggtctcagattatatattacacagtatcaatgggtatcgaaatgtaaactttcttcactcacagaggtccacacatgcgcatactcactggcatgtggtggttcttcgccctgatgatgctcagtacctacacggccaacttggccgccttcctgaccagcaacaagtggcagagcagcataaagagcctccaggacctcatcgaacaggataaggtgcacttcggcagcatgcgcggtggcagcacctcgttgttcttttcggagtcgaatgacacggattaccagcgtgcgtggaaccagatgaaggacttcaatccctcggccttcaccagcaccaacaaagagggagtggcacgtgtgcgcaaggagaagggcggctatgcctttctgatggagaccaccagtttgacctacaatatcgaacggaactgcgatctcacccagattggcgagcagatcggggagaagcactacggcctggccgtgccactgggtgagtagctgtgccgccagtggagggagttgggatattactttcttccatttcaaccaggctctgattaccggaccaacctcagcgtgtccattctccagctgagcgaaaggggcgagctgcagaagatgaagaacaagtggtggaagaaccacaatgtcacctgtgactcctaccacgaggtggatggtgacgagctgtccattattgagctgggcggcgtgtttcttgttctggccggtggcgttctcatcggcgttatcctgggcatctttgagttcctgtggaacgtgcagaacgtggcggtggaggagcgagtgactccgtggcaggctttcaaggcggagctcatctttgccctgaagttttgggtgcgcaaaaagccgatgcgcatctccagcagcagcgacaagtcgtcgtccaggcgatcatccggttccagacgcagctccaaggaaaagtcccgcagcaagacggttagctaggtggtcggaatattggacgattggcgtcttctactttggcatttcattagagagtcgcattggaaatgaggcactccatggtgtccacattgtatattgtgagctatatttgtagaattattttagaacacagatagcgcatttgggtatattgaatgttctgaagatttaacgaaactttcaatgaaataatttggataactaattttagtaaacttttctgttggctctaatgttttaatagttgacaataattgattttccttacaaagatttaataaataaacattaaaatat

SEQ ID NO: 42 - protein, 907 aa, Drosophila melanogaster
MRLCPVVIYAFIIIIGFLEGIIALGGDDRNEITVGAIFYENEKEIELSFDQAFREVNNMKFSELRFVTIKRYMPTNDSFLLQQITCELISNGVAAIFGPSSKAASDIVAQIANATGIPHIEYDLKLEATRQEQLNHQMSINVAPSLSVLSRAYFEIIKSNYEWRTFTLIYETPEGLARLQDLMNIQALNSDYVKLRNLADYADDYRILWKETDETFHEQRIILDCEPKTLKELLKVSIDFKLQGPFRNWFLTHLDTHNSGLRDIYNEDFKANITSVRLKVVDANPFERKKTRLTKVDQILGNQTMLPILIYDAVVLFASSARNVIAAMQPFHPPNRHCGSSSPWMLGAFIVNEMKTISEDDVEPHFKTENMKLDEYGQRIHFNLEIYKPTVNEPMMVWTPDNGIKKRLLNLELESAGTTQDFSEQRKVYTVVTHYEEPYFMMKEDHENFRGREKYEGYAVDLISKLSELMEFDYEFMIVNGNGKYNPETKQWDGIIRKLIDHHAQIGVCDLTITQMRRSVVDFTVPFMQLGISILHYKSPPEPKNQFAFLEPFAVEVWIYMIFAQLIMTLAFVFIARLSYREWLPPNPAIQDPDELENIWNVNNSTWLMVGSIMQQGCDILPRGPHMRILTGMWWFFALMMLSTYTANLAAFLTSNKWQSSIKSLQDLIEQDKVHFGSMRGGSTSLFFSESNDTDYQRAWNQMKDFNPSAFTSTNKEGVARVRKEKGGYAFLMETTSLTYNIERNCDLTQIGEQIGEKHYGLAVPLGSDYRTNLSVSILQLSERGELQKMKNKWWKNHNVTCDSYHEVDGDELSIIELGGVFLVLAGGVLIGVILGIFEFLWNVQNVAVEERVTPWQAFKAELIFALKFWVRKKPMRISSSSDKSSSRRSSGSRRSSKEKSRSKTVS

SEQ ID NO: 43 - DNA, 4161 bp, Drosophila melanogaster
ctggccgatttctggctgggaattatttcgctgcgcgttaaaaaatatatactttttagtgcgttaatagtggatctattgttctggtgctctttttaaagttgtagtaatgcacggtctacagttcctggttcttctggcactagcaattgccagcggcgccaatgaagacaccttagtgatcaaaatcggttggttgataacttaagtgtatgttcaaaatgtacaaactgatttcgtttaggagccattttcttcgacacggaaatgaagttggccgatgcctttagtgcggcactcgaggaagtgaatgcaataaatcccgctctcaaactggatgcaatcaagcgctatgtgaccgtcgacgacagcattgttctgcaggatatttgtgagtactgacggaagtacggaagtggtgcacaattaatcctataaatcttactgctttagcttgcgatttgattggaagtggggtggctgctattttcggaccaagttcaaagacaaacagcggtaagtttcattttcctacgtataccataccctctgggatatattatttttaaaacgaatcatatggttcggcgtcataaaataaattgtctagctgcatatacgcgcgtatacaaaatccattaaagagaacggcgatagagaaagagcagcgaggagatcttctaaaggctcgtcaacctcgttaatgattcttcaaaatacccaaaaaaacacactcacacaattcggtcataaaattgggctgcccaacgttggatccaaatatttttgcagtaaataaagcgtccggtggttggggaccatttggagaagagccaagaaaaatcgacgcgttttttgtttgcgttgtgctctctgtgttttgatcgccactttcgttgtgcgttccggtagttcccccgatcattctaaacaaaaataaacacccccacattcgttctccttctccccctctaaccatagacatcgtcgaggtactgtgcaatatgacgggtataccgcatctgcaattcgattggcatccccagcagtcgaacagggagcgtatgaaccaccaacttaccgtcaatgtggctccaatggagctcttcctgtccgccgccttctcggacatcttggccagcaagaccttcgactggaagtcctttaccatagcctacgagaggagttcccgtatgtattgtgatatgattacatataacatttacaataatttatttaagtttttatgctttacctctaactttcaattccttagtagatcctaacacatcctttcgcacatagaccttattcgcttgcagcacatcctagcatggaaacagctccacaaagctggtatcaagatgcaggaattcgaacgaggggatgactacaggatactgtggaagcgcatcaacaacgctcgtgaaaaatttgtccttctggactgtccatccgacattttggtggacgtaatcaatgcctcgattggatataatatgactggttcatttaatgtgagtactaaaaagcagttttgtatcttaaaaccacgtactaagtttgattactttctaaatcaacagcatttatttctaaccaacttggatacacatctgagcggcattgatggattctactcccgggatttcaccgtcgccgtggcagctgtcaggatacgaacctatgtgcctccgccagttcatgatgaaatagatgtgtttgacaacagtgtggataccagggtaaaatcgaagaatccaacttgaaatatgctgtgcttatgtaatttttccttggtatacaatagttttcctcactgggatcacagctcgtgtatgattccattgtgctgttctacaatgctctcttggaaataagtcagcgtccaggattctacatacctaattttagctgcggacgtggcttctggcagccaggaccgcgtctggtggagcaaatgaagcaggcaagttgtttgatttatacggaaaagtaaacggacatgttctaaggtacttcgttttcagattaccccaaagatggtgaaacctccatttaaaacacaaaggctacagataaatgctgatggccagcgagaagattttaatcttgaagtttacaaccccataattgatcgcgtaactcacatatggaataaggagtttcagcttgtggactttgaaaaactgagagagaactcgactcaagcccttaaacagaagagacttcagaacaaagaggatttctcccagaagcccatcagatacacagtggccactcgagtgggcaaaccgtacttcagctggcggttagttgggaaaatatcttatatcttattttattattattcattattattagtgaggaacccgaaggagtccattacgagggcaatgaacgttttgagggctatgccgtggatttgatatacatgttggcccaagagtgcaaattcgatttcaactttgaaccagttagggataacaaatatggcagttacgatgcgaatacagatgaatgggatggcataatcaggcaattgattgataatgtaagatactttaagatactttaagatcggatatcttaaaatatttatttgttaaatctcttttgttttatcatagaatgctcaaattggaatctgtgacttgaccataacccaggcgcgtcgttcggtggtagacttcactgtacccttcatgcagctgggcataagtattctgtcgtacaaggagcctccaccaaaggcggatatatatgctttccttaatccgtataatgccgaggtatggctattcgtcatgattgcgatgatgatcacggcctttgccttgatcttcaccggtcgcattgatcagtatgaatgggatcagccggtggagaatgtgaatcgcgaaatggagcggcagaatatctggcatctgagcaacgccttgtggctagtgttgggctcaatgcttaatcaaggttgcgatctattgcccaggcaagtgaaagatcttcgacttctagcttatactaactagtaggatttgcattaatccaaacgtacctttccgtttaggggccttccaatgcgtttgctgaccgccttctggtggatctttgccctgctaatctcccagacatacatagccaagttggccgcctttataacctcgtctaagattgctggtgatattggctccctgcacgatctggtggaccaaaataaggtgcaatttggcactattcgtggcggggcaacttcggtgtacttctccgaatcgaacgacaccgacaaccggatggcatggaacaagatgttgtccttcaagccggatgccttcaccaagaacaacgaggagggcgtggatcgggtgaagctgagcaagggtacctatgccttcctaatggagaccaccaatctgcagtattacgtgcaacgcaattgcgagctaacccagatcggtgaaagttttggcgagaagcactatggcattgcagtgccgttgagtaagttactccgtttaatgaacgttctcatctagttttcctcgaacttttccaaacagacgccgactttcggtccaatctcagcgtgggaatcttgaggctcagcgagaggggtgagctcttcaagctgcgaaacaagtggttcaacagcaatgagagcacctgcgactcgaatgtcccgaccatcgatgatggccagttcgacatggattcggtgggtggactgttcgtggtgctgatcgtcggcgtggtcgtgggactcgtgatcggtgtcgccgagtttttgtggcacgtccagcgcatttcggtgaaggagaaggtaggatgcccccacttccaggatgataattcccttttaatgaaatcttcttgttagattccacccatgctggcactgaaggcagagttttactttgtaattcgattctggttgactagaaaaccgctgcacacctatcgccaaagtcgggattcaacttcgacgggttactcatcgctggagcaaattacaagtgcttccagtgcgaaaaagaaaaaaaagaccaggcgaattgaaaagtaggggagtaaaaaggcttgcgaacattcagtgaaatacgattaagattaggataaggatattttaaaatggatcctttaaaagctctacatacgaaactt

SEQ ID NO: 44 - protein, 884 aa, Drosophila melanogaster
MHGLQFLVLLALAIASGANEDTLVIKIGAIFFDTEMKLADAFSAALEEVNAINPALKLDAIKRYVTVDDSIVLQDISCDLIGSGVAAIFGPSSKTNSDIVEVLCNMTGIPHLQFDWHPQQSNRERMNHQLTVNVAPMELFLSAAFSDILASKTFDWKSFTIAYERSSHLIRLQHILAWKQLHKAGIKMQEFERGDDYRILWKRINNAREKFVLLDCPSDILVDVINASIGYNMTGSFNHLFLTNLDTHLSGIDGFYSRDFTVAVAAVRIRTYVPPPVHDEIDVFDNSVDTRLVYDSIVLFYNALLEISQRPGFYIPNFSCGRGFWQPGPRLVEQMKQASCLIYTEKLQINADGQREDFNLEVYNPIIDRVTHIWNKEFQLVDFEKLRENSTQALKQKRLQNKEDFSQKPIRYTVATRVGKPYFSWREEPEGVHYEGNERFEGYAVDLIYMLAQECKFDFNFEPVRDNKYGSYDANTDEWDGIIRQLIDNNAQIGICDLTITQARRSVVDFTVPFMQLGISILSYKEPPPKADIYAFLNPYNAEVWLFVMIAMMITAFALIFTGRIDQYEWDQPVENVNREMERQNIWHLSNALGLPMRLLTAFWWIFALLISQTYIAKLAAFITSSKIAGDIGSLHDLVDQNKVQFGTIRGGATSVYFSESNDTDNRMAWNKMLSFKPDAFTKNNEEGVDRVKLSKGTYAFLMETTNLQYYVQRNCELTQIGESFGEKHYGIAVPLNADFRSNLSVGILRLSERGELFKLRNKWFNSNESTCDSNVPTIDDGQFDMDSVGGLFVVLIVGVVVGLVIGVAEFLWHVQRISVKEKIPPMLALKAEFYFVIRFWLTRKPLHTYRQSRDSTSTGYSSLEQITSASSAKKKKKTRRIEK

SEQ ID NO: 45 - DNA, 12665 bp, Drosophila melanogaster
gcgatcgccgcgagtgtatattttttttttagctcagtcttcagtgtttcgcgattctctttaaaagaaaaaaaaaataataagtcaaaactacaaaccacacagcgaaaggcgaaagccaacggttcctgcgagtgtttattttttttttcaacaatttttgatcgtgggtatcctgaaagtgaagcataaaagttaagaggatcggaatggaacggaaagaataattgcaaataaatgaaaaagaaggaataccagaaggaattcaatttaatatcagtgcacttgtaaacaacacacattatcgccaagccacccaacctacaaatctcttccatccgtgtgactgtcattaatttttggtgtggttcccgtggtcaccttgcacggcgttatctgagtgggccacgaagagaggagcaagagcgcgatccattgcacgcccggaatcgaaacgattacatatagtgcacaggttagagttcttctgggcccaatctaaacgatcggattcgcatgtgcgccccacttcagacgcgctgtctacactcgcggaaaaagtccatgtgcatctcttaaaaaattaagttcgattctacatttacaaaaatagtctttttcttacatatcagaaatcttagccaaactcaatgatactatcacacaagaacctttaatgacattaatcttaaacattctgtttaactcggataggttttgttttttttagagtgttttgtcaaaatccggtaaatcaatcagtgccgcacctccgaaacggtatctgtagtatgaatgcatttaattaacgaaattgtttcacagtgcaaaagtgtttgcttaactgttgttaccatatgcaaaaacgttttacgtacgcccgctacgaatgtaccgttagcagtagtcagcgcaaataacggcaaccagttatgtatctgttatcgatcagtccgattggcagagggctcaagaatgttaggccaacatcatccatcatggggcatttggttataagcaaatatggcccaaactatagatccgttcggttcgtcaatcagttcagttagttggtaactctgttaactcggttgctggataaaggccaatcggcaatacatgtataggaatgatattaaatactaaatccatgttagtgaaatatttccaaaattaatcgtaatgtttaaaattaataacaattttcaaagttaaaaaaatacatatatgtatatcacaaaaactatatcacttgcagacaaacacaaaacgatagaaagtcattattatagtttcaagatttgcaagctaaaaattaagaattctatccaatcttttatgcagttatggacacataactgtcgcctttaattgccgtgtatagctcgaagctctgacgtagtcttatcaaaggaaggaaaaccagaagcaccaactaagacgatgacgagactgacggaggaaacgagacattgatagatcgcaattcaattaatcatcttgccgcgccggcttgtaaaacaatgtcatcattagcacccaataggctcatcaggcccgcctggtatttccacccagatttttcagactccggacacaatgcttgcgattctgtgccttattcgacacccctctcatcccgccctagatttttactcatctttctccgggaagaattgaaaattggaaaagaaaaaaaaaaaaaagaaaaataacgaaagaaaagcacagcacggcttttgacgcttgacgacttttgcgattatttactaaacgtgttcattttgcagttgctgctatttattattgattatacgactatttagcgtcggtatatgtaaatattttgttatttattaattttgtttcacataatatacgaccgtagtccgtacgacttccccgccaattctgcacgtaacacgggcttctcagttctcaattctccgttctcgatttttaatttttaatactctggggatgcacgtgcccctggatcgttgtgatagtgatctagcgatccttcggcgatctatccaaaaatacccaacgatcaccatgaactggagtatgtgggctatcaattagtaaatgcttttattgtcatattaaatgttctgttgtctacaccacttgacgtcaaacattgacttaattcatttacatgatcatcgaacatgattatcagggttttatttgggttcgtcttgggttcggttcgataaagagtggctccattttatggctttacgacgggtgtgttgtgagttgtgagtgggggtgtttgtctgcgaaatttccacgggtctcgtgaaagttatgagcaagcctatacacttttgggattaatattaaccttctgccatatttggtattttatgaaataacgatcctaatttactgttaacccgattcgattatcagttatttccgcaaactttttggcagaattttccactccaaaagaattccaagagggcaagcccaaaaaaaaaagaaacaaaaaagggaggaaaaaaaagcgttaaaaagatcgcgtttgggaacacacagcgtcatcgaaatgtttgttcggaataaataaaaacataaaaaaaaaaggaaacacaataaatgaaaagacttccattgaacggcgtcatcgccagccagtcagtgctcgaggaacgagcccaatagacgactttttattttattgttaacaaattattgtagtcgccgtagttgctttttagttgccagcgggaatacaggcaatagccaaatagccatcatgtagcgaaaaaaacaaaaaaaataaataaacagaaaaaaacacaagactactccatagataatttaatagaaattatacagtaagaagcgataataataattaaaactgttgcagaacaaaaggcagcgtagcgtagaatcgttatcagcgatcacttgacttgaacaacgggaataaacaattcgaattgtcccaatgtaatcaagcgtgtaatgagaagactttaccgatacgcggcgatagtagatcagcgttgaaaatagaaccaatagagcccatagaaccaacccccacctaaggaaggtatcgaaagaccaaagcaactgaaggaagcatagtagtatagctcgattagttgattcacgtgaattggcgggggattccacgcgcgtaaagtccacaggaactaccccaacatgaactcattagggcgaacacgctggcaatgccatctttatctttatgatattgtaagagtcacaaatctgcacccgcccattgatgatgatgacttgagcggccgccaaagcttttatctttatgatattaactaagaactttcaccatcaattaccaattagccaccaatcaccatcgcatatctttatggatggcttaagacttgcagtccacggacataaatagtatttaacacaggtgattcaacaagtactttcacaattgtcttcagctatgacaacaggctctttgggtgactctatagcctgtctgtacgtttctccaataactctaatcactgggaactctaatgagtaagtagagttcgcaccaaacttatgacacctgatgattttgagtttgcatttgagtatttgggcttgtcaacttcgctctgtgttttgcattcgcgatcgctaattggcagccaagtgcggtcggtcgattcacatggcgagttttaggttgacacaacacccacagcaagcaccacccccctgaatacccctggccacctttgtgatccccagacattcgcacacactatattttcgtagataagagccaacaagatggggacctgaactgctgggagggcaacgtctgcgacggtcgctaatcgttagcggactactttgcaccgcgagaaatcgtggaaaattagcgttaatgccctgttctgccccgagcgatatgattagaagtttcaataggtgtaagcctcggagcctcgatgacgtcgccaacctggcgatggcaactccagaaacgatccagcgatgacgatcattcggctaaggaggccacttttgatacgagctgcgcgtggttttggccaagaaatgcggccaggggaaaacgatcaattgcaacgaacacggcggtactgtacttcgcaaaagggcttaagctaccgcctagaataatagtttagatgcggttttatgatggcactttatttgcaatgagtgttgggagatggctaacacatatacatacatgtatgtacatactaacatgtatgttagatggattgtcttggggatgtgccaacgcataacgcataagacccgcaactttgggcggagggcatggaaccgtatagtccggtatctctgctctctcctatcgtgcacatatagacaacaactagagcgactggccagcacttggacaatcgcaatcaagcttcgattagcggcgatacaaccataaataacaacagacaacacaagagcggcgcgatcacaccgaaccccccccccccccctccccatccgaaaaaaataataataaaataaaaaatacactgatccactgatattccgatttgaaaacaacttcccattccgatccgattgcgatttcttcgttaccaaactggaatctttagctgtattcgctgtcctttcaggtagtgcgacaatccgtcgagcatgtcgccgaatcgatggatcctgctgctcatcttctacatatcctacctgatgttcggggcggcaatctattaccatattgagcacggcgaggagaagatatcgcgcgccgaacagcgcaaggcgcaaattgcaatcaacggtgggtgagctaccaaagaaatcaatagtattgcactactccctctatatccactagtcatatagtcataattagccgcgtgatccgcaccagacgatccatgagcatgtgatcccgacgccgacgaacccaactaaatagtcgcccacgactttgatagaaagtctagagccatgtccgcgaatcttttgatgctttgacacccacatgttgaggtttctcgacgcgtggttcacttttagtatagcttagaggtattatcttacagagtcgtaatatttcaatggttagtaaaaagaagaattagtttcaaatgggttcttcttctggagtatgtagggcaaaaaaaaaatcgcctaattaaagatatacatatcctatatatatatatatatatatatatctggatacgtattttatttttggcaaaacgtgcgtaaatgtgggagcaaagtgtgaggtttacgaatcgacacgtctggggcaatcacaggtctgtttgccttatagacaacgcgacctctatattcgatcagtgtgaatatatatatatatatatatatatgtgcgagtatgtatcggggtgtgagagcgattatatctacgctaaatcgagctaaatcggcagtctcggatgtatttattttaatgcctcttcaattgcaataaatccggatttaaatagcacataaagtgtgctaattatgcaaataaataacccataaacgctctaattagtaaccatcgacccaagacgtgtgtggatcgtaacggattgaatcagaggctaacccgatacactatcgtcgtacagctcaactctggtcaacctaggtcactccggttgaatgagtcaagtcgttcgatggtcaatcgatgtgatatgagataggcccagttaataccctagattctcacatggcattaactatgtgtctccgttttgttatgcatattcaagcaggcaaagccagtggacaaagtcaccataatcactccttagcacttcaattggctatgggctatggacgatgaccacaaccgtgtgccgatgactttcaagtgtccacaaacacggtgagattaggtttgagctgttgacacctgataaggtgaccgggccaaatgacacggccaagggatcttccactaacagaattcccaggaatgtgagtgatcagtgattcggaatgtggggtatattactttaaagtttcgcccagaagatataaatgatttccttcattttgaaaaagccttgaatctgtaggcattgattactgttttttttttttttgttagcattaactaaattaataacttgatgcactttgcaatgaagctcattataccacagcttaatatgaggggtattaaaatgaataatttatttaaataacttaggctttatattcgcaaagacttgtcgcaaatatatagcgaagtcagcacgatattataatgcaaggtctattttaaagcgatgagttaacttaaagacaggaaatgagaattatggacattaaatatttagagtggcatattaattagtgtggctttcattaggtattataaaaaaaaagaaaagtatttaaaaaaataggtactgctactcttcagatgatttttgtatttgagaatgtttcgaaatctcgaaaagatcgtaagatcatagtgatcgtagggacctagctgcatctgcatccactgacctcgacctcagtttgtttagatggactgccagcggacttgctgcctcgcttgggagagctttaattaaattaatttatcaatttgtttgccacaaacttttccgggccgcactcaatcatcgagataatcagtgtaagccagagaggcgagtcgagaggatttgcaagaatttgagataatgatcgacttctatgaacaaattgcccgcaatcaagatccacaaaggcgattaaattgttcccgttcgtctgtgtggcatatactactctatatggctgttgttgtagctgttaatctctgaattgcccccaattgtgtcccgttgtgatcagagatcagcgatgagagcttgccagatgacagatgcgagatgagatgggatgacacccagatgactgcaaatccctttgttggtggccacttgccttcagagtccggacgcatttattgaattatgcaattcgttaaaagattacgaggagtaactcaaaaattgcttgcatttgcacaaggctcagggtttattgaatgattgcacttgcattcgagcaatctgccaaatagtaagtagaatgctctctcgagactcgagtccgataaacttggccataaaggttagacagccgatcatgaaaatctcaactgataggtgtatggcacttggttttgataaggaaaaacgatggacgaacagcagtgattagagagcatccgttccgattggaacggttctctagacatcaatcaatctgggaatcaatcaattagcataatggccattcaatagactttgtcattcaatagttgaatcattcaaagatcaaaaacaagtgatagattacaaacaaaatttgataatctctatctattcatagattgtgtaatcgtttttgtttcagttatatcagagctgattgataatcgcgaatacttgaagattgtatattgttgggtcttgaaagcaaactggggggtttattgactcaatttcaattgattacttcccatagttaatacaatcacttcagaattattgcataatctgtgatatcgttcaatgtctcgtcgtttaattaattcccagaaatcaaaaccgatcgaaaaagctctacttcttactactgacctacagcaagattcgctaaactcattttccggccacgatctcaatttatgtgcctgataaatatctttcaatgaaaccgactggtgtcgttcatccagcgcatttcaattacccggagccgcatcgtccgggtcaggtcatgaacgtggtgattgcctatggcgatctgaacactgcgagaaaaacaatgttatgtaaggttttccaattcggaatgtttttcgaaggttgcattattacaatacgtatataattagcgatctctatagcatagttttcagcagttttattcaattcgattcaatcaccataatcaaatccgaatggcaattgtttcaagtgtaataaatagcacgatgggggaattttttatttaggtagccactccactcagtgacgatcgatgatcaccggattcgtaacggatttcttttgtgtccattgtttatggacatcgggaagcggaaggtcagcgctcggtggcacattcacatccggatcggattcggttagacacgtgaaccacaatggcggagagcaattaaaattgatttgatttcacgctcaatcgggcatgaaagtgcactaattccatgctatcccccaaatttatttcgctacagaatatctgctggaggagctgggcgacaagaatacgaccacacaggatgagattcttcaacggatctcggattactgtgacaaaccggttacattgccgccgacatatgatgatacgccctacacgtggaccttctaccatgccttcttcttcgccttcaccgtttgctccacggtgggatatggcaatatatcgccaaccaccttcgccggacggatgatcatgatcgcgtattcggtgattggcatccccgtcaatggtatcctctttgccggcctcggcgaatactttggacgtacggtgagtggggaaatgtaattcaatatgtaaccataaatcatatatgtatattggcttcctcaccagtttgaagcgatctacagacgctacaaaaagtacaagatgtccacggatatgcactatgttccgccgcagctgggattgatcaccacggtggtgattgccctgattccgggaatagctctcttcctgctgctgccctcgtgggtgttcacctacttcgagaactggccctattccatctcgctgtactacagctatgtgaccaccacaacaattggattcggtgactatgtgcccacatttggagccaaccaggtgagttgccctcaaatatgtttaacatcgagactccgtgtaactatagtatatcttaaatttgccattagcccaaggagttcggcggctggttcgtggtctatcagatctttgtgatcgtgtggttcatcttctcgctgggatatcttgtgatgatcatgacatttatcactcggtaagtgttgggctgcatcaatatccattgcatgtcctacgtttcgtgtcttttgcatgatctaaccatcgaacaataatcaacatcatttaacattcgcgcattcggcatgaacaggggcctccagagcaagaagctggcatacctggagcagcagttgtcctccaacctgaaggccacacagaatcgcatctggtctggcgtcaccaaggatgtgggctacctccggcgaatgctcaacgagctgtacatcctcaaagtgaaggtaaacgattcccatcatccatgtacatcacacaaatgggctagcactcagtgtttcaaaatgggattgcactttaacttgggaattttcaaataatattagaagcttaattaagtcattccatactttaaaatagttatccttatattcttatacctaaaaatttgaaaagttttcacaaataacgaattaataaccattaggtataaaacattgctaacaagctaaatatacatataagcggaaaatttaatataaagattaaggttgattacaatataactgggcaaccacattaactatactattattaactatataaaatattccttgatatgattatgcactcgtgtccaattgtgcaccaccacacggggctaactaaccattgatcttgcagagagattttcactgggagtaccttcaatgtttcgtgtccgactaagcggtatcctcgtatccacgttccaattagccagtattcttagacgttaaccaaaatcttaaatagccgctgttctccgttctagttttgtcgaaagggaaatagaaagaagccgaaaaataaggctaagactgagcagaaaaagaagagcagccgatgtaagtaatacaaccagagatttccaatggacccacatcgagtttatatagacagtgctagcccaaaatcagtccgacaattggatgattaactactgcccacgatgcaaaggtcgaacactaatctaaactattctctttacatgtacgacaccaaatcaacattctacactttttggaactgcaaatatgactaccaaactttaacacacatggactggaaatcgaaactcttacattacattgactatacatatatgaaaccgaatttgttatatcgtattaatactatcagcctgtgtacaccgatgtagatatcgcctacacactgccacgttccaattcgtgtccggatctgagcatgtaccgcgtggagccggctcccattcccagccggaagagggcattctccgtgtgcgccgacatggttgccgcccaaagggaggcgggcatggtacacgccaattccgatacggagctaagcaaactggatcgcgagaagacattcgagacggcggaggcgtaccgccagaccaccgatttgctggccaaggtggtcaacgcactggccacggtgaagccaccgccggcggaacaggaagatgcggctctctatggtggctatcatggcttctccgactcccagatcctggccagcgaatggtcgttctcgacggtcaacgagttcacatcaccgcgacgtccaagagcacgtgcctgctccgatttcaatctggaggcacctcgctggcagagcgagaggccactgcgttcgagccacaacgaatggacatggagcggcgacaaccagcagatccaggaggcattcaaccagcgctacaagggacagcagcgtgccaacggagcagccaactcgaccatggtccatctggagccggatgctttggaggagcagctgaagaaacaatcaccgggtgccggtcgcgtcaagaagttctccatgccggatggtctgcgacgtctgtttcccttccagaagaagcgcccctcgcaggatctggagcgcaagttgtccgtggtctcggtacccgagggtgtcatctcgcagcaagccagatccccgctggactactacagcaacacggtcacggcggcctccagtcaatcctatttgcgcaacggacgcggtccgccaccgcccttcgaatcgaatggcagcttggccagcggcggcggcgggctaacgaacatgggcttccagatggaggatggagcaaccccgccatcggcattgggcggtggagcctatcaacgcaaggcggctgctggcaagcgccgacgcgagagcatctacacccagaatcaagccccatccgctcgccggggcagcatgtatccgccgaccgcgcacgccttggcccagatgcagatgcgacgcggcagcttggcaaccagtggctctggatcggcggccatggcggcagtggccgcgcgtcgtggcagcctcttcccagctacagcatcggcatcatcgctgacctctgctccgcgccgtagcagcatattctcggttacctccgaaaaggatatgaatgtgctggagcagacgaccattgcggatctgattcgtgcgctcgaggtagtgcacacccatgccgtgcttgatgaacagcaacaggcggcagcggctggaggagctgccggtggaggcggaatatcgaggggtagccgcaaacagcgcaagatgggcaatgctggactggagccaccgcagctgccgccgatcctgtcgctcttcgctggcgatcaaacgaggacactgcaggcggcggctgccaatcggctgtacgcgcgtcgctccactattgttggcatatcgcccactggtggagcagccaccgcaccggcagccagatccctgctggaaccgccacccagttacactgagagagccgcaaatcaaagccaaataacagccggtccatcgaatgcgccaactgttcagagcaaattccgtcgtcgctttagcgtgcgaccgactgctctgcaaattccaccgggacaggcgccgccaccaggtgccagtttgatggagcagtcctcacagacggcgctccagcgacgcctctcgctgcgaccctcgccactggcccgcgaactgtcgcccacgtcgccgcccggaggaagtggaagcgccttgccagcgggggccatcgacgagtctggcggaacgtccgctcaacggctgctgcccttgcccgccggaacgagacccagcaccagcagcacccactcgccgctctcgaggatcgtgcagatctcgcaagcacagcgcaagagcagcatgcccagtgcagcggccacgggatcgagtggtgcccccgccgagaagtagttaggtttccttgtccgaaagatgtattacctgtatcgtatacatatgtatttccacgtccagcggaattgctttgccaatttcacagcatgtatgccacaaagtcgataaggctgccaaaagtccttagttgttatgctaatgttatccttaaacctatttacatacgtatatccagttatcctagttgtatgtattgttaaaactatctctctatctctctctctctattgttatcctgtatttatacccatataccctaatctatatatctatatatatattcttctatgtttattgctaagaaggcgcttatatgaacaaaacgatccgcatgttttcaagcattcaattgggaccgacaaaggatctcg

SEQ ID NO: 46 - protein, 1001 aa, Drosophila melanogaster
MSPNRWILLLIFYISYLMFGAAIYYHIEHGEEKISRAEQRKAQIAINEYLLEELGDKNTTTQDEILQRISDYCDKPVTLPPTYDDTPYTWTFYHAFFFAFTVCSTVGYGNISPTTFAGRMIMIAYSVIGIPVNGILFAGLGEYFGRTFEAIYRRYKKYKMSTDMHYVPPQLGLITTVVIALIPGIALFLLLPSWVFTYFENWPYSISLYYSYVTTTTIGFGDYVPTFGANQPKEFGGWFVVYQIFVIVWFIFSLGYLVMIMTFITRGLQSKKLAYLEQQLSSNLKATQNRIWSGVTKDVGYLRRMLNELYILKVKPVYTDVDIAYTLPRSNSCPDLSMYRVEPAPIPSRKRAFSVCADMVAAQREAGMVHANSDTELSKLDREKTFETAEAYRQTTDLLAKVVNALATVKPPPAEQEDAALYGGYHGFSDSQILASEWSFSTVNEFTSPRRPRARACSDFNLEAPRWQSERPLRSSHNEWTWSGDNQQIQEAFNQRYKGQQRANGAANSTMVHLEPDALEEQLKKQSPGAGRVKKFSMPDGLRRLFPFQKKRPSQDLERKLSVVSVPEGVISQQARSPLDYYSNTVTAASSQSYLRNGRGPPPPFESNGSLASGGGGLTNMGFQMEDGATPPSALGGGAYQRKAAAGKRRRESIYTQNQAPSARRGSMYPPTAHALAQMQMRRGSLATSGSGSAAMAAVAARRGSLFPATASASSLTSAPRRSSIFSVTSEKDMNVLEQTTIADLIRALEVVHTHAVLDEQQQAAAAGGAAGGGGISRGSRKQRKMGNAGLEPPQLPPILSLFAGDQTRTLQAAAANRLYARRSTIVGISPTGGAATAPAARSLLEPPPSYTERAANQSQITAGPSNAPTVQSKFRRRFSVRPTALQIPPGQAPPPGASLMEQSSQTALQRRLSLRPSPLARELSPTSPPGGSGSALPAGAIDESGGTSAQRLLPLPAGTRPSTSSTHSPLSRIVQISQAQRKSSMPSAAATGSSGAPAEK

SEQ ID NO: 47 - DNA, 110459 bp, Drosophila melanogaster
tgaaaaaaaaagaaagataaaaaacctattgatgcggctgccgaacccagaaacaactcagtttcaactcttgccctgtggcatctgtcctctatatatatttgtatagtatatacatatatatctgatctgaagttccaagtcgcgagtgcgtttccgtttccgtattcgcgtccattttcgtttcggtttcgttggaaagctagagcggctgctgccactgccacagtttcttcgatcggaaccggatttgggaaacagccgccaagatgaccatgtggcagagtggcggcatgggaggccatggctcccagaacaatccatggatgaagctgatgggcatcgtccacaaggagcggcgccacacggagaacgttcagagtcagtccggttccaacgagcgcaacctgaaccagtgagtattgaaaatattttatattaaaatattaatttagaatcctaaacgaaaaatataatatataaatatattctttaagaaaaggttttagattgatttagattttatgcaacataactaaaccgaattagttaaccaaagtggcaacttttgcaattacacattggcaaaattttcagaaaatgtgggatatggttttattatttttttattcttgtaagaagcattgattttttgtgaaggaagaattgtgtgtgtaggtttgataaagggaagaacaagcaactagtgggctttatcccatcttcatttgcgtttatttttttttcttggggctcgataagcgtaattttgcatagttctgcgaatgaatcggtgctttaatgggctttggaacaaggatattcgacgctgcttgcgcagaaaagtatgcggcacgttttttttttcttttttattgccatcctaccgactttcggatgtcgaatgtggatgccatgttatgcatattggtcgtaaaacatgcgccaactgcgcaattaaatggcccgcaatgcaaatggaatgccgaggaccagcaccaggagcaggacatgttgccaggacacaaagtgtgcagctcaaggcgggctttggaggggatggatgtcgtggaaagtcatttaccacaaatcaacactgccaactgcctgcttcccccccctttttttccaagtgaagcgccctgtaaatgatatatccaaacggccagtggccaactatcattatccgcccaccagtggccaccagtggccaccagtagataccagtagccaacagtggccaccagtggccaccactatgcgccgacggtctcggaaagtgcagctctttgggcttttaaattggctataaatgcgctggagcataaatggatttacacacatgcagcttgttgctgtccccatttgcccaccttcgccatcattcatttccattccatgttgcatgcaaataagagccactgcatcgacacgccccctttttccaccaacaccccgctccacccaccgatccatgcccgattccgcatttcgcatccatttgccgcacttttcaccaaggagtccttataaaaattgtacaactcgccatatgcatacatgcatacatgtgtatccgtactcatatgcacttgtgtgtgagtgcgaaggaagttaaatggaaaaggcacttccggaattcagatgagcgaaacggatgccatgcagattgaaagatggatcgaagaagcgaagagcggcaatctgattagtcggtggtggctgaaactgggttcttgagccacaaaatatatttgatttttgccagctttaggaaacgaagaactaaatcgcaaaattcgcgcataaaaaatcgagaaaattgcgtaatacattaagttttgccaccaaaagtggcattttggttcattaaagttgagcacactttaaatgaagcttaaatatcttcaatggatattgaaatatagctaatgcctgtgccgcgactaattatatttattttcaattttgcgagcgcaaaagttgcgtcgtcgggcaccgctaaacttctctattgccgcacaggactcgatggagtcctttagccagcactcgcgttcccaaaacttcgctcgagcggattaattgaactagttccccaatttgccaactaatgtgcttgctagaatccgacatttctgcatcctgcatcctgcgacctgcatcctgcgtttttccatggggtatcataaatttatgcaccctcaacgccgcacatgcactggcacacaatggaaagcacttgaaaatgaaaggataataataatatttttattttattatattttagtttttcattccgctttttgttgcaacaacagcagcagcagtagcagcatcaacatatgagcgggtggctcacgggggtcagaggtcgctgggctagtgggccagtgggccagtgggcgtggctgggcttaagtgcactcaagtgccattggttgtgtgggtgtgtgttggtaaattgcatgtgtaactatgtgctggcgtgcaagtgttggaaagtgctcgcaaactgtgcaatgatttcgggattccgccggattactttcgcccaagtatttcgcaatttatgtccaactcgttcgcattttctcttcttgctcttttgcccttttgctcttcgcccttttgcgttctcctttccctcgcccctttctctttcaatttccttttcttctttgccttgcactcgtgtttgaaccctcgacaaaagttgtgaattattttattaccttcgaaatgaatttggaattgttcatattttttaagtggcttgtttggggagcattgaaaatcaaatggaattttgtaggccaaagaacaatacgcaatactgatttagctcacatattcatgtttaatgtaaagttttattgataaatttacagattcacttcatacatatttcatgcttgagttgctcaaaaatagtgaattttttgtctacaagaatgtgaaagtttcaaaggtataaatgtattctaaatgagaaaaaaagccaggaaatttaagatctgtatattgcaccccaaatataataccagtttcgtaagaaatgttgccgcgcatcgatatagttttcaaatcaaaggttatctgataagcgagtcattcgaccatggcgttacctcctgacttgtctcgttcttcgtatagaaaaaacaattatatagggcgttcatgcataaatattgcgaaggtcagagaggccaacatgaaagggttacgaaggcgtggcggcagcagccttgtttttttccaaaccaaatgttgtttactattctacccatacatggacacccatacatcgcattccccaactacttgggaccaccgagcaacagttgaacatttggaaatttgcataaatttcacaacacagcccctggccttctcctcggcaaactttgtgggaatttatagaaatgtgcacggaacagtttccatttgcctgggcagtcgggctctttgttgcccttcaaaggcatttgggtccaacatgttcaaatgaatactttataagcccctctttatggccatagccctgtctcactccctcttcctctccctctctctgtctctttctctgctgctgtctctgtctctgtctctgtcatggactgtctctgtcaccgcctccctttcattttcgccctgccaatgtgtaatatttatgctgcgaaatgtttgaagttgacgaaaccatcggcgtagttgtaatatttaacgccaactcagtggtatttacactaaaaaaatatcaaaattattatttttaatgagaggtagcaaatagcctgagtacttgaataatttcctagtgattttctgtgctatttaaatgtgtgacgtccttataacgatttaattacaatttttggtattttaatgtgggaaccattgaacgtatcaattgaagtactccaatttagtacttatttaagagtacaacttatttttctcagtgcttgtcattccactcggtggcattatatcccctttttgcccatcatcatcatgggcgtccgagctattttgcattgaaattgaaatgtccgcagcttttgtggggtgcgtccgctttttgccaggtgaaaggcatccgcccaactgggccaaaataagtattgtacattatatttgctaccctgtgtacatggacagtgggtgtttgtatgtggtgggcatcgcatccctatatgcttatcattttgtcattgtcatttggcgcggcgaattaattggaaattcaaacatattgaccgacataaatacgtggataaagtgcaagtccagtcggccggttgattactacggccaagttgttgctgtagatttgtcaatgtcagaggtagtaaccgacgaacagggtgctatttatacacctatatcctaattaatagagagttaatattcaaaactacctttgaaaacatcgatttttattgcaaaactaggagcaattggtgagcaactaaagctgatactaggatattttaaaagttgaagaattatttgcattttcccatggattttcatgatagatatcccttttaataacaaaactaatgagaccagcatattcattttcatatttaaatattcatagattaagaaatcgttctttatcactagtacgaattgaaaataaagtttgagccttttgcctgtggcaccctgtcaccatttgttgttcctgtcatcgatttcgcatcgcatgagactagttagttagttacttaacccagcccaagactgtctgaatttcctttttcccagcccattaacgcattaattatttgtggccgaaaaatcgtccggcggtatattagtttacttatctgcgaaaattattcatcagttcaaatgcataggaatttaacgataattaaatggtaaataataaataaagtgaaaaatatctgtatattgtagtttattatttcaataaaaatgtttttatctgctaaaatatttttccttcatacgtggccaagttattttaccaaatactatcgataatttattaattgaatattttataatttattatttgaatagtagagctgagacttttatttgttacgtcaagtttcccggacttaagccttgtttgcctaggaatttgtagcaaattcgtaagacaaaccctatttaagcaaaccccatagcagcgtaataaattttcgtgggcttgtcatgggttaacaccgctcctgccgcaccccccgctctcgcagctccatcctcaatttgccgatggcgtcttcgccttctgtctaattgctggccattcgtttgggccacgttacttggccagccgtcgcttatcagcgcctttcactggaagccgacttattgccacacccacgtagcgaaaattgcgacccatttgttagacggcttctggcaaatcatttttcatttgcctgtggaaactcgcagcactttgtctgccacctggccaggtgggtggtttccaccacccccacgctcacttctttttttttttttctgtatggttgcttgtcccattgaactttactcaggcgaaattaatgagcgcatacgggcataacaccactcgtaccatttccaccggtggtcagctggtcagctggtcagccggtagagtgaaatgcgagtctactgccgtgcgtccactgaagtgcacctaagcgcgaaatgtttgcggttgtaagatgggtgtccttgtgccgatcccaaaccgtgtaccctcaccagaagaccgcggggggggggggggtgggggtggcgttctattctatgcgcggacccataaaaaacccaaagtgtcaaagcgaaacgcttcaaaacactgctgccaacaagcgggggcaacattttggctaacatttcaattggcacgagcataaagaacgcttcgggcggtattacgtttaggtggttaggtgtagactaactgttaccctgtaaaatgaatttcaagtgttttttaaatggacaaatggttacacacacatgatttctccaattgaaagtattgtatccaatttaacataagttttaggcacaatcttaacaaaaatctacaaatttaaatgggtagatcaagggataccgtgcaatggaaaaatattcttttttttttaattgtcaactactgtaattcctgtactttaaaactttgtattaatttatacaaatattgatattaaaatggaaatatttgctgcgcataattatagccacttaaattatggtctaaaagccgtaagcgtttcggtggtaaagtatttgcgcaaatagttgtatagtccaaagataccgccaattaatattaaattgagaataaatcaattaaagtacatttgtctaatattttcgatatttattcattcgcaattcaagtattttaaatgcaataaatttccgaattgccattttagacaaccgaaattgaatttattcgcactatataaattacgccttcgatactttcatctatgcttcattagctggcacaaaataatatgtttatgtgtgtttggagtgttaataacgaaatgaacatcaatttcaatttcaatttgaattttatgatatgtcaaatacggactcgaatcccaactcaagcattcccattaaccccattgtccatgtgcaattccggttgggatggtaaccatctggttaagttgtgtgtgtgtgtatgtgtgggacaaagattttccttgtattgtattttccctttgccaacttgtgtgtctcgttgaccatttgactttgatttgttgtttggctgcgttggactacaagtgccgaatgcctctctagcagaaggcaaggggggaaaaaaaacaggaggaatgtataaaaaacacacacacaatggatgatggcaaacaaaacagaaggcggtgtgcaagtgccgaaagacaactcgtagcactcaattaacgcatttaaaagtacaatgcgggagatccaaggcggcggggtcagaggtcgccacttgtcggggtttattttcgagaccgtcgggcccgaacacacggccattgtgcatccgccccattgtctctggcacgcggcgagggccatcgtctcatcggggcattgtttaacccacaatggataccccattcccgtgcgggcatctcctgctcctgctgctcctcaggttactcggtctccacagccacccatcgccaaacaaaccgagagcaccatgagcaccgactgccggcacaaaattgaattgatagcagcatgagttggataagaggacttaccataaccgaaagcagtcaggaccatcaattgattggccagcccattaggagcgccggatcaaaagagatttcggtttatggagtagcatgaaactgctggaaaatataaaataaacagcagttagaaatcgtagttattaactttaacgaaatgcatttattgaacgtagtatatgaaagtggtaactattgaggtaagcgtttagtaccaaaaagaggttaaaagacatttaaaaattataaagcagaggtaaagtcttggggctctctctcaatcacaaaagcattcaaacaattagtaagtgcatcaagttgaggcaaaaagttttctctaaagtctggacccagacatttgttaccacgaatacgggccaagacggttagtagacgggattaatgactgtttgagccaagttattggcttctctagtgacatttaccatttgacgggctcattcattaaagttccactggacaccctacggcatttacaccagaaataatttatcgcatcagcgattggcagctttggccatgattattggcctttttgccttgcacgttggccccttttaattgccggcactgtctctctcgcacacactatacacctctctttcactcgcacgattgtatttccttttttggtgctggacttctggctatttttcagtcaaatttgattagttaagatgataagctggttagaccattttcaatttgatgttttagtttataaaccaagaacgcgtatctacttgttatattagaaaagtggatatttaatctgtttattatcattatacccgttactcttagagttatagggtattctagattcgtgctttgtccgtatatccgcccgtatgaacgttgagatctcaggaactacaatataaaagctagaaagtggagattaagcatgcagattccaaagacatggaagacgcccactctaatagtatctgatagagcactggaattactaactttaataaaaactataatctattagttagcttctgtagattattgacttggacaacactatttgtttgtgttatgggtaagcaaacccttgtgaagtcatgaaattgtatgggtctttatggcccagtgacctgctcacgttgttcatgttaaaattccaaattacattttgcattttgattagagcgtaaacacagtgacctcctgctcctcctgctcccaatcctcggccatgtactaagtattgtagtactggtctggagaaaagtttccccccttcggattctgcagctcattccccccacgagacactggattcttgatgctcgtttgcaatttaatgaagcaaactgttgctaaagcgaaaggggaggggtgaagggatggggctcaactgggaggagccggagtgatttggtgggggcggcgttcaagcatgaaaattgtttgtccacggactcgaggggattccggcggaataaaagcgactgaggctactggaaggcgcttagcgtccaacagctgttccaaagccccttctcgtcttcgtgttcattctcattctcatccttatccacactcgcattcgcattggcatccgcatccgcatccatatcccacccacccagtagtatcctgtgtggcatatcctgtagccgccactcttggcaatttgacaagagcgcattatccttacaaacggcaccagatgggcctgccccaacaaaacagcacaacaaaaaatgaaaaatgatagagagtctgaattttcggcggagaaggtggcaactggacgggggggtctataaaactggggattagcccagtcaaacgattccgctggcatttggccaaaaactacaaaaaatccacaatgcgagcaaacagaaaagtacggaatatatgtatatgaacatacatatatttaaaactgcataaatcaaaacactcgtgccgaaaggccaaaggttgacgctgataattgatggtcagtgccaactgacggtgattttacagggctaacgacaagaatagccgtaaaaatgggtattcgattatcgagaactaagcgggctttaaaaattaaataataatttatttctattgttaaattcgagaaactacatcccgcttccttgaaactttttcaacaagctctgatgttaaggtcatcgaatcgaattaagcttctatgtcttctgtttgctttctatcgtcaatagctcaaagctgattttatttcaccaatgctcacacttgtgctggctttgccatcacagcaatgcaatgtggaatgcaatccagtaaagaggaatccctatttaggagccagtgccatctgtgactgcgctgcctttaccaatttccaacatttttccccagtttccccacacagaaccagccgcaatccgtgacgcattccggatccccgaattgcctcacggtcgcaacgatgacaaagggaatcgagaaatgcaactgaaattcgttcagacaatggccaaggggggttggcaggggcgtagggagcgtagggggctttaaggcgactgtgagggtggtagacaacgaaaaatgcaaattgtcaaacatgcaacgcaattgacgagagacgaacttcgaggcacaactgcagtggatgtggtcctatgtgtagctacccaccgaaccgaaccgagttacactgctctcatttttctagttttccaaactgaatagcttaaataataataagtaaaataacggtgaaaattcagtcaagtctattttcctttctgtagagtaaatgcaagcatcggggtcaccaattgaacttattgtagatgaaaaatatatagtctataaaataaatataggggtcaccaaatcctatttttataatgtcatagttcttccttaatctagcttttagtttattgtccgttttaaaaggctgtttaaaactttaaaactgttaaggcaaacatttaagtgcaagtctgggtcacatttttatagccacgcacatctttcctccgtttttctcagtgtacttcagcacagtgctacgtttagggtggctcagtgtgattgagggtgtgtattttggggtggtacagggctctgccaaacatcgaaacgctttcgtgccgagctcagttggtttcccctattgacaggccgtcactctgccagtccgtcaatctgcggagcttcagctcgtcatgtggcctatatagccgacccggtggtcctcttaccaattcccaaaccgatcggcagctggttccccgcctggaaattaactagagcccctgcctcgtcgcccgcccacttcgccttcgtccgtggtccgtcgtccatctttcatctcgcatgaaacatccctgctgttccatcaacggtttggcacatccacaaggtgaacttgttgctgcaattggcagagtgccctgcgtccaggcatttttaagcaggcataattaatggagcccggcccggataatgtcaacattatcgcagctaattgacaatggagaggcgtggagctgcaaagtggtttggggccaagccaagatgttgaaacggaatttaatggtacacggaatatgggaaatggggataatgtgtgtataagcctaaaggagcattctttcgcttgacatgtccacgatgtgaactaattaaccaaaacagaaatttaatctagagaaaacagaattcaattatatggcatgatacgatttgtttgtctgaatcggaagtgttaataaatatttccccacctgaacacacttcacttcaaatatataacactttttccactccaccttttgcaaattagcagttcacacccaactattttcgcacactttcccttgctgtgcctttcaattagtgaatttccagacttgtgagcaaacaaattgtgaaaacatgccagcgatcccaaatattgaacaagagaaatgtagaaccatttgcatttggaaaaaaaaaacagtttgcatttatttattgtgccttagactagttagattttgagccatgactctgcagatctttaagatcgtcttgtgattagcgactcctaactattgtcggagattaaacgctgctcattgtagcgtatgggatatgtgagtgcgttgcccttgtcccaggagtagagttcctaaaatatataatatcgaatacatagtatgtttgtaaataatcacagtgagatattagttatcacttaccacagtcaggggattgtagcccacggtggtggtatggctaaagggattcgagaagggcagattcgtgttgagcagcttgcccttgtacaagtccactacatatcgaatctgggtgttcttgtccgttcccgaatcgatggcatacagattgccacacacgatgaacatctcaccaaactgatgatggtccagggtgatattaaagttgtactgcatcttcaacgtctccgcatccaactggggaaaaatttatcatttgggtgaagtttttgagggacccacaaactttaccttggccaccagcgtattgttggagttgtaggtgctatagatcacccacaggcccacttcatccacattgaagtccatgtagttgtagtccgtggtataaagcctattcgcagcagccactccagcatatggcaattgtgtggctagggggaatatcaattgatagtaatatgcatcttaaacattgcaaaacactcacttatctttttcaggctggtcaagtccagcttgaccaccagatccgagtttctttgttgatagtaaaacgaaccgttaaagaccacatgtgcattgccctaataatgaaatcaaataaattaggaatggaaaatcttgtaacttttcataactcacatgaaagccttcttgaatctcgtatttcctccgggggatgctattcattcggtactgaatgcgagtggtgaactcaaacagattgtacggatcgttttcgttagtgacgaacgtcttctcacgatcactgtccggagatggatctctaagccaggagccgaacttttcattgaccaccttgtggaaaacgggcttgcccacggcatacagatagcaagctaatgggtgagatattatattgtatatgcttaaggatgttaagacatctacttactctttggtcgcttgggtaatcccggatagctgagattgcccgtggcctggatttcaaagttattcagtatggagtccttgcactggtacaagcttcagatatggagtagatgtaaaaaaacttatcgggaagttgattatggaaaacccacctgggatctggacactgatcgcaaacgggacactcgctctccggcggtctttgaccgtataccttcatgttatttcccacatacggggtctcactattcggatcttgggctaaaaaatggggttattgcaaagatattcaacatttcacacattttgcaacttacgtgctatttcaaagttgaccattgtggcatttagttcatttcgggccacacaatgatagtacccaaagtcatccttacgcagattactgatggtcaagcgcatggttgtcttgaaactagggagcttcataattaaaagggatttctacggataagatggtatataaactcacccctctgggtacgattcaatgccgtacttgtcgctgggatcgaggatcttgccgtcgtaggcacgttcccaatacctaatggcttcggggaatgcctccaccaaacactcgagtgtggcactgctctggtattccgcgtagatcatttggcgatacaccgatatcatgggagcaactgggggataggaagtctctctgttcataactaatctacaaactttgctcgccacacacttacattgcacttccacgaggtaggtggcatttgccacgggagcgatgccattgttggcaaaacaggtgtaggccgccatctgatgtcgggtgatattggtgaatctcaggaactgtccgctgatggaggccactgaatggagaggattataagggcaattggaagtggtcacacgcatacttactctctacgccattgacattaatggtgcgaccatcctcacgtcgccattccacctgcggtgtcggagttcccgtggcggtgcagctcaaattcagggatcttccctcctccacaatcaccgtgcgttggaagtccggcacttggatgtcttcaaggaggaaaatctcgttttatacttatgtatccaccccttaatcctcccttcggctaacttacctgttatagaaggcggtatgagcagatcgttggaggagctgccattgggatattgcagcttccaggcattgatgccgggcactccgggtatgccattggttcccggcttgccaggtcgaccacgtggacccgcaatgcctgtccagaagatagttacaatctaggaataatcgaggtataaaggggataacttacccttgagacctcgttcgcctggtggtccctgcgcacccttgggtcccgtgatggacagaccatctttgccatccttgccgtgtagcccatccttgccatcgcgtccaggcaggccattctttccatcagcaccagcgcgacccggtacgccatcgagtcccggctccccgggcactccatcccgtccatccaagccggctcttccggtggccccggcatctcccttaggaccgcgaggtccggcgggacccaaatgacccacgccatccacaccgggggctcccggtaatcccacatcaccgcgatttccctttggaccggggatgccaggtagacccgggtttcccggtggtccctttggtcccacttctccggttggtccttgcggtgccggcggacaatagtcctgggtacccttgcagaagcccgtgattatcttctccggaacacggcagtatgtgttcagatagatccactcatctccgccgggagcggcgcccttttgacccgtgcgcttacggatctcggtgtcttgctcctccaaaaccttgcgatggttcggattgaagaactcgatcagcggatcagctggagaggtgcgaaaggaagaatagttatgtgaattcctagtcaggctacctgaacttgccatgcatggatgccggagcggaggaggcgatgtcccggcgcattcgtttccctgtgggacgcgttgtgtggctaatcaggttatccgtgaacttgcgttcattcttcagaggatccctcgattgggtggtgctactcgcggtggtgctattttggggggtacataattatgtgccaaaaactacgggagcttgaaaagttagtgatccgcccacctgccaaccaattcctgctcctcctcgattatcctgttgaccagtctccttaattcctcttccgagcgcattaactccgcctggaattgtacccggaacgatttcgacgaatagttatcttccacctgtgacaaggactcgacgtcctgggtgtgcgtgtagaagacgattgagaggctggccaggatgagggtgagggcgcccaggtagatgtataccagggtcaaggactgcctgcccgggcacttacacacccggcaagtggctccattgccaactccgaccaactggtcactggacgcactgggttccaggggacgaactggtggcgttccttctccagaatcctcctgcggatcatcctcggccgtccgccgcttgcgcttcttcttgctggtattctgtagactctggttaaccgccagaaacattttaccgcgttcgggtgcctaaacaagtggtaaagtggtcttagtctaaagttagttcttattgaattataacatttaaaattaaaggtttcttgcttcttattttccgcaattttcatttaaaattttcttcgcgtgccaatcgaaagcaaaggcgtctcacaaatttttgattttcatttattttgatttatagccggcgagtgcagtttgaaaataagttgccatatttatagatcgcatttgaagtgatgcgtctaaaattaaacgactacccactgccgctgccgctggattcaagagtgattaaactgacataaagcaaaaagaaaacacggaattctgatgcatttctctgttttccccgcattttacatacttgtatacataagagcagagcccctggccgtacaacttttcacacttttcctctggagtccgttgatagcgtgaatgcgggtgtgagaaagtgcgacggagatggaggaacgaaagagagagagagaaagagccgttgagcgacagagacagagagtgtgtgtgtgcgggagagagagagagagagagagctgcctccgaacgcgttggcgtctaatgctcgactgagcgagttgtgcggcgacactttccttcgtagcggtttgttttccacgctttcgccggcaactttcccacgcatccggttggctctctctctttttcctcctgtccggctctctctctctcaatttgcgagagagcgtccgcgactatatcctatagctatagctttacgcacatcgtaaatatatcggaaagacttaagattcgtttgatttcggttaagaaatctaaaataaaatcgcataaataatgtctgggaaatcttcatgtttgctgactagaatctcaatgctaaccaagcatatatatcttaaaatttatatattccatataaatatgcgggaaatcataagtttgtttagcgagagagttagtcgctcttcaatttcacgcctgcgcctgaaaagtacctctgtttttatttcatttcttatatcctgcagtagacacggatattcttctttaagagtcctgtttcgctggacggatggccggagggggggtttagttagtggggggcttggaaaatcaacaatgaatgcacacggctcaggagggaaaaactgtcttggcttgattttgcctcctcggagagggaatactttgcgatatcctcaacaagtacaaagtttaatggggcaaacttggcccatggcagccagaaagttttcctattcgcaatcatgggtttcccactcaagttttccacaagacactccatttggcattgtatcaggtgtgttttcttttatttcgaaactgcaaaggttgattagaaaatatgtatcttattggttgccgtggcaggaactttaaattaaaaaatgtgcattgctatgaatgatccttagctttaatgattaatttactattgtattttttcttcttaacatttccgaattgtaactctgctacagatcaatcaattttaaatgcgctttaggtattaacttatttgctgagaatgtcaagttcctgaatatttattttcgggtgcgctctccaagcttacttagtaattatcgcaattagcgcttccattctatcgattcaaattgattgcatttgctcaaataattatatgttattatgtgccattccgagtgccactcgattattgttgccacaccttacgcccacttgaccgcccacttgaccgccctcttgaccgcccacttgaccgcccacttgtaccgcccatcgcccagcagacagcgcacatttgtaagcactttgcgcttaatttgcatttctgtttctgttttggaaggcggtgccgaagaccaaattcaatttacattggccaaatgcatagaagagcacgacccaagggccaatgagccgtaacgagctcgttaactggatccggaatctgcagtccggattccgtgtattccgggtccagcaactccaaatcgaaaccgaaaccgaaatcgaaatccaagctggacctggtcttgttcctaaatctggattttgaccattcactttgttgccagctgtgcgctgcatttgttggccaagtacaatggccagaaaagtgggtggaatgaagccattcgccggcaaaggccaatgtcagaaagttggcagcatcaggtgcactgaaagaaatgatcagtgataggtggtgttatattattatattcgattttttaattattcaagtgagaatttgatcatttcgttgtaacgttatcacaaaatacaactgttgccactggataaaatattatattcttaaaatattattttaatttggtacgcaaatatttttccgtttagataatattttaattatagtcgctacatctgactttaatctatctattagatctcatatatgacttcatattgaacagaatttcctgaaaattactagctgagctttcttaagctgcagactgcaagtcagttttgttcactagcaccgacaaattttccgctgggagaaactattatctgtttggggaatttggcgagtgtaaagccaactgggagcttggccaagctgtttggcggtttggcagctagcgttttccaggcgggccaatagttgtaagcggcttaatgccaaacatcggcagagcaacaagccgcaaggaaagaaaagcaacaagccaagaagccaggaggccaacaagacaaagttaaagccaaagtgaaagccgcatcccaagtcggcaaacaacagcagcgaagccaataaatcaaaatgtcaagatgatggcctttgaagtgctttcgagctgactgagcgctgaaggtgagatgaggtgccatgaaatgggtcaaaggtggcatctgagccaagatatccaacaggcaacagacatcagccgtcaaaaagcagaacaccgagcaacgacagcggccaacagacgtcgcttaatttcgaacaagccgtgaatcttcccggcaaatgacaaattaaatgacacgaactgtcggctcaaaatgccgacatttagttaggccccagcttagcacacacgcccactggttgggtttcaaattttgtggtgtagctaagaatattgattgctattaatgcgctctgacctcgggtcacgttgcgtatgtgtaataaatttgcaagtggaaggagaacggtatagtaagtaaggaagcaaaccaaaagtcgggactcacttagaaaaataagttcacaggtctttgattgccataaatgggctgtaatctcggttcacgttgcgtatgagtgataaatgcaagccagatcatttgcaatttgaagtgaagaagtggtgcacaaagttagaaaagtaggaaaaatataaaaataaccttttttagttttaataatctaaaaatttaatttcaatacaattacgattttttatatatttttattcacttttaatgtgttaacattaaatgttttctgtatatttccacatttacatatgcaatataaaaacgatataatattttcattactgacttactttcatgcaatatttcttatttaaatcaatttaattatagtcctttttacaatttaatttggcacaatggtgcgttggagtattcatttatttcttcaactgttttttccggaatcacttaatccttttatgaataaataaatcatcgtttgtaattgtatatttttgtaatgaccatttttttttcttaataacaaccataagcagtcaataagtgcaaccgtggaacttggttttttccctgtgcagcgcttttttatgaccgacgtccacttccaaaagtgcattcggagctggtttctttatggcccagttagcaataaaacctccagctcaacaacaaaacgctgccaaaaataaacaaaaaaagaagaaaaaaaaaagaaagggggaagaaacaatatgcttcactccctcgaaggacctgaaattgaaattttattagcatatttcccaggcttccttcgaggaattcgcctagcttcaatcacgctgattggagcgtaaggttcccgcacagcaaagggactaggaaagtgaactttaaaaatctttttgaaatcggaaaactttcggcaaaacacaaactatttaagatgtccattgtgaaggatttaaattagattgatggattgaaaactcacagagaaacatagtcggaatacttaaatagctgattagaggcgttcaaaggcaccaaaaagtatgagttaaaatagaatttatgagctttacgcccattaaatatttaaagaatgtggaagtaaatgcatacatttatagacgactatataatttaaggaaaattgcatttaattcatgcaatagttgattacttaaaattgtatcgtatggtaagaaattaatacggcattcatttgaggaattattgtaagagtatgaagaataactttttgagtatctttttgggcgcgtaaaagtctatgaaaaatgattcccggccctcggataattgtttaattgccgcccatcgctggaaacggatatgggcgtggcactagccagtgaaaattctgtcagcatcgccttaccttcatcttcagttgtttgcggtgggcggtggcgtttttctgtggttcgtttgctacggtttgcatttcctttgcatatttatgaggaaaagtcgtggaaagcggccaaaacgaacaggaacagcattgaacagcatcgagtggctgtgcttatctcccaaaaaggaatcaaacggaaaacgaaaaaattaaggggaaattcgaggcctgcggtggcttttcccttcgcattttcattgcgaaacgccacaacaacaaaatcagcagggggaaaatgttttcagagtttaactgaagcgtaagagctaagctggttcaagttaatgaattttaaagtacatgttcccttatctccttcgtttagtacattaaagtcattggaaagcagctcgtatttgaaaataaattgcttagtacttaactaaaattattgctagcaatgagcaaatatgcaatagttgtacagaatattttaaaagcaggttttattatttttatttatattaattttaaaactcttttcttttgtatatttttgtgtataaaaagacaatgttacgaagtcagtcaaatatatatctgttcctttttttaaaagtattcttatgcaaaagtatatttattttcagtcgaaatcattttccacttaagaagagctacattttaatatctgtagaccgactttgttaacccgttatcctgcacccttcgtttatttcaattgcgctccctttgtctttgtcgtttcaattgcctctgaaaaaaaaggaggaaaatttgcagaaaaagcagagatgttggagctcgactttcgtgcgggtgtcaaagtgggtggtgccgagcggtgctgggtggtgcgtggtgggtggtggtgcaatctgccgctgatgccgagcggtgagcacgtgttcgcctttagctcctgctgagcaacaaatgccgacgagccgagcgaatttcgttgtcgctgccgacgtcgccgtctctgctgctgcctctgcctctgccggcgtcgacgttgcctgttgaaaacttcgaaaactcagtagcagcattggaaattcgaagaagtgtaaaaaaagctctcgacaaatgctttagggcttgcaaaagcttcgggttccttcaagtttttccgcttttaagttttttaagtattaatgcaaagcaggtactcaaaccaaaaacgaaagaaattttaagcaaccgattcgagtttataaccatgtgtgtaacggtcattatacccgataacaaccgattcaaattcgaaacaaactaaatgtgaagcaaaactagatatttttgtagcaaaaatcgaatttgtactcgtagttctaattaaaatcataaaaatggggtacttagaaaaacgtcggtgcttttttcttgttggctgtatgtcgtcatcacctacatacgtatgtacatatgtagtgactgaccttttttgggaagcacattgacgtcatgaagcgaaaagcttcacctcgatctacgaccatttgatgtgaaaatgtgagcatgccagtgtgtggtgaaaagcgtcacaattgcacaaaagtcacgtttttagccttttatccctttagcctggattgtgtcaatgaccttttggccaacggaaacgcagtgaaaggaaagaaaatggctaggagctaaaaagaatcatggcaaacgaggtcatggggtcactgcggctgtgacgtcagtgttcccaattacaacctgaaaaatataagcgggacactgcgagaaacgaggttgctaatgagcatgatctcagcaatatatgaatatgatatatattccctaagtcctagtatatttattaattgactgaactagttatagttagttaccttattaaattttggcttttacaaatttacaaaaactaattctgtgcttacattcttctttttttctaatttcaggtgagtaaaaacccctataaagacttctaaataatacttacttacaagatgagcttagccaagcaaaggttttggatctataaatatccttgtacattattattaggtaaacgttgttaaatctagttttttcaaatattctatcactcaactttatttgttttcatgaatcatcactttgaacccttaaaaaggtgcaacaaattttaatttaatttaatttaataattttaatatactaacccgacgatctttactttagtgtaaaggaaggtcggaaaagcgtatttatacctgtaaaattttcccggaaatacaacgtatctttttcttttactaaagcacggaaatagtgcccaaagaaatggtttgcggcttattcacttggcagatgatgatccattcggatgatccattcattgcgatccatcatcggcgcagtccctcctcaacattttcccaacattttctgccacctacattatttcccaccaccgattttcccaaaaattctcattgctcgcacaaaacgtttttcgagcgaacatcatcagcagcaatcaatcggcaaatgaaaggaattcggaattgtgaaaatgcattaaaatgtttttctcgcggaaattcacccatcaaaccacccacttggcccggggtgcggggttcttttttgtgcgatttaaattttaaacagggtatgcaacattttcattaaaataaagtcccacgagaagttgataacaaatacgtatttaactttatataaaagtatttaacttgcatatgtaatgagaacaacatatcatacttttcgatattgttgtattactgttgttatatttgtttaaatattttgaaaatagcaagtaagcaagtgcttagtatctactattaatgggtactttgggcttcgattgcccgattgctgaccttcctctttgttagtcctcgatcgtttttatggtttatatgttgctttcttggtgagttttcttttttaaacaaatagagaagagcagtaaaaacgatattgtcgacaattgacgaaaacagggctacatggtcgacggctctttacgcaatcttcgcttttcgcctcttgtgagtgaaattgaaatgaaaatgaaaaacgagtgaaggtcgcagtgaaaatgtgttaaattatgtgtgtttgtgttgttaatctggagacgcgatttaaacgcatttataagtgtattaacatttgtgttttgtggcccatgcactttgttttggttgctgctttccatctgccatctgctgaatgcaaatatttgtgattaattgatattgtgcagaaattgcactttgcatttgcgtcgatttgccgatttgccaaacggaagatgaaaatcactcgtgcatgccgtgccatcttgccatcatcggaaaacgttgcccattttcctgggcatttttgccatcgattttctgttgcatgtcatttgtgtaatcgatattcccccataaaacaagcattgcctgtctgtttgtttgattttttgtttgtcaaatacttggctgggtttcgttgccgtgattatttgtgtcctcctgcccgcccacttgttgctctcggatcttttgagggttcgaggcattttggaccaaggccgaggacagtcatccgtcgccccctaaccacacctcccacgttttccgctttccccccaaaaatcctcaaatgcaattcgagaatggttcacagggctgttggccatggcactaagtgattggttaacgatttgggtaaatacttcgtttatgcgctcaaggttttggtattatattacttttattttgtagagtaaagaaattaagagtaatatttgttttcttttatttttatacattttaaatagtggtagtgagaaaataagaaatggcattgtatttttacaaacacattgccgatattcaaatatcataagagtaagtcacttttctgacaattcacgtactctaaccacgcataaacgagttttctgaccgctgtttctttgggtcgccgctggccgttgacgttgcaaacaatttgcgtgaaaaacacttttcacacaaacgcattgccagatagacagtttgaatcccactcacccacaattctcagacattcaacattcgcattttcaaattgctacagtaaatattatcgcctatgtgacgtataaggtggatgcgaaggaacatattttccaaacaccttagatgaaaatttatggccgtttaaaatataatatattttgcattaacaagatgctttataattggcacaactttttgtactaaatttagagataaacgttgatgatattattaaattgttagtattactttacaaaatatattatattatacatatataaaatatattttcatgtaattattaagcttatatttcatattatgttggtaaatgataaaagtttccaaagtttcctagagatcgaaatgtgtttttttttttctttacgatttgctgttttcaactatatgttaatggttgcactactgctttcttataacctatacgtactgtattaggatcggtatataaactggatattcccgatgctgccggcgtcgctgcctctgccgctgtctggcgcgactgcgacgccggcagcgttttgaggcctgcgagcagagcgattttcagtaccgcgcacgccggtgatcgcttcgcacttgtttaagcaaaaaataaatattttaacaataccaaaaaatataaatactacaaatacaaaatatagaaatagcgggtaaattcttgatcatttttttgttgttgttgttgtgagtgcatacgatgatcgtgcagtgaaaagtgaatgatccgaaaatcatcgtcttcgggattttcatgtgaaaggaaaagtgtcgcgttggtcgtttttgttgtcattctcgttgatgacgttgtcaatctgccaatgcccctccttctctctctaacgatatgtagccctctctttctgccacacattggccagaaagttatatgtaaaattctttattttttgtgagtgctgttctgttggttttgtttttttttttttttttcacccaatgttgtttcttttttgttgttatttgtgtgagccgcgcggggcggtggaaaatgtgaaaaatgtgcgcgacaactgcggccccgccccctcgagcgcccctcgccacacccggcctctgccagcggcgacgccgacgtcgctgcccgctgcgtggacaacaaataaagtgaaaaataaatgaaaattgtttcgtttcatttcttttgtcatttgaatataaataagtatatatctagacgtctgtctatttgtctcccctcacaatcgtatatatatatatatatatatatgtatatactcgtatgcgaacgcatatcggctgatctatatacggacctatagaatcttaagtgtttcccgacttgccagcgaataaaaaggaaaatccagacagatttggaaaagcgattaaaagacgcctaaaaaagaaaaacaaaatcccagtggagatcaaagtgcacgtgcagagagagaaaaagtggagtaggtcgatgaatggattgcctgtatggcacacatcacgacgacgcacggcagcttaagccaagcgacaaggtaagcgtaccgccttccgtaccgcctctgccactgccactgccaccgctgcctctgccgccgtcgctgcttcagtcgccgtcgctgccgccgcaaaagatcatgatcgatgggatctatcagatctgtaaatcgaaagtcatagattttccaccctatcggtaatgtcgatataataaatttcgcatttagaattaagtacctatagatcgtgttgtgaacttaaaaatttcaatatttcaatattcattttgttaagatcaatattaaagaggaaagaatgaacatttctgtaaaattcaggccgcttaaatacgaatgtccttcttaatattattattacatataataataataatacatattttaaacacatcttcagatgaaacacttagtgaaaattgcatataactttcaaacgttgttttcagtgtttcagttcttgtaactaaaaaattaatcatattgaaatcaaatgcaatagaaacaagtggtttgttgtgttttccaagctattagcgatataattaaaaaaaaggtccttagtcagcgtgatttgggcttatgaactagtcgtccccctttacctggaaaatctcgtttccacattgtttcgttttagtttgccacgcgatttcagactttcattttcttttcatttccatttttttttgttgcacgcgcctcggccaaatcgttcttttttcattctgcatttaaatttggttttattattttctaaatatttactctggagcgagcatttagcatttacgactgggaaatatgtgcaggtgcctcggggcaacgtttgagttatgatctgtggcatcaagcccccaaaatagttgatcagatgatccatatctacggtcatgtctatctatattcacattaccatccaacctcggattgcagaaatgttaaactatttaggttttcctccgtttctgtgtattatgttatagttattagctttctgctgccatcgattggcgtgtcggctaattaacgtggttcacaagcgcatatgccgaaagagacggactgcgtgtgcgagtgggagggcagactggtgatgattattaagaagaagggtcaaccttggcggcgacttaaaatgcgctaacaagcggactcccatgtctcccaggtcttagctcaccagcccccgttaacctctccctgttagcgccataatttctctctcgctgaccactttggtcatttctcactctcattcacctcgttataacccgtaaaacgcgctctttctacaccttggagacgctctgctctcgcgaatttcctactttggccaaagccgtttgaaaattaaattagaaagcatgactgctagcttggtgttcgaaccaaccagttaaatacactaactaattcaccacttaatttatacgttatttgaaaattgacttacaaaagtttaaaaaataaatgaagagcaagcatcttataaaataaatgataagataaaagataaaatttcctgtgaattaacctgtggttaatttctttgtatagagataataaatttgatgtttttacaaataatttttaatgcagtacgtgcaattgtacaaatagttagttttaaaaagattaactatacatattttataagatattcttaaactaaaggtgacctttaaccctgggtttaaaattcatgaatttctttctgaaaatcacaaaaaatttttgaaaaatgataatgtttgaggaaaaggtagacagctacgatcgttggtgtctttgtggaccaccaagtcgagctggaaccaccgaaccaccgcacaccacccaccacccactgtcgcagtggctgtgtcagcccgccacgctgttgcactttcaagtggcgcgcgcgcccgtacacatcgcttccacataaccaaaaaaaaaaaaatatatatatatatcaaaaaaaaaaaaaaaaattcagtagatttcgagcgtctcgttgggccccaaaaaattcacaaaactggtttctggaattatgcatgcggcgccacatgtgcgctcgccagcagagatgcgtcacaagaagaagaggtagtgagcttctgactccaatctcgattctccggagaatcgagactcggtgaactcagaatccaaactctcgttttgcctatgatttgctaattttttcaaatattttttccaatgtgtgtgctgtgtgtgaaattggatatgattctcattggaatggagacaggcaaaagcagtttgtcatgcaggataattttaaaatgatgtaaatatgtgccaagatttttgactttttcttagagtcacagtgtaactttggtattgattacagtagtataaaattgctaaacaatagaacagtacgatttattaattgagttttctactcagtgaatatgctattgtatttgagagtagtgaatcttaataactacaaagtttgaattttcctttcatttatcaaagatcattaatttattcgcataattatattacaaatatttattgctagatgagctcttctttgctcactcatgattcggaatattgaatctcagtttcatcacttatttcttttggcggtgtatatattgtatgtgccatctctccactttgtgggccattcgggatgtttcgagttggcagttgaagtggcaaagcggatatgttagacgtcacgaaacaatcccatcaggctctccttttcgtcctttgtgagtgtggtgtgtgccttttgattgccacagccttgacgtgaagcggaaatatttgcccagcacttttcgtctttggtttttctttgttcggtttccattttccgctgctgctctgttttgttttcacgaacattttttaattgatttgcctttgtttggctgtcgtttttgttgtcgttgtcgccttcaccgtggccatgaccagttagccgcaaaaacaaccgcctcttcactttcccccaccgtaatttcctccaactttctttctttcatttattattattattattttttttttttcgttttggaacacacacgcacacggctctccgtctttgagtgtgtgagtgtgaggagtgagcgaagaaaaggccatcaattttgttatttttagcatgcaaatcgttctgtcagccttcggggcaaatgacttggtcgagttggtgccttcatccatctgacatccagctgggcaagcagatgcccccggattttctagctttccagcttcacagcgtccctgccatgcaatccgatgcactcgctcatggcttttgtgccggatattatttgcttggctttcacctccatcgccaggaaatctgtgtctcactgtggcaaacatttgatcaataatattttggagtagccccctccggaaaacactttcgccattctcctcacgtgccgtgactgcttattagccatgaaggttaccagcaccagctgagttaagttttgttcacagtgaaaaaatgtgttattaaaaataacatttaagaaaagtgaagctttgtggaaaaagaaggaataagaacatttttggtcttagctgaaagcaacgtaatggtccaaaaaggaaactttaaaaagtgattggcattaaccagtcagcttttcgctgagtgtttttgcttcagcttttgccacatggtcgtcgcgcatgcaacccagagcaacccaccctgccccacttaaccactgaacgaccgaccactgacactgggccagggcaatttgcatggcaacaacggcaaacacacgccgcatatgaacagcacaaagagccggccgtgatccatgggccaacattgcgtatgcgtcatatgctcaatgttgctccgttcgtcgacaaattgcaatcgcacatgcaattgaattccattccagttcagttcagttcagttcagtccattccattctcagcacccggcaacaattgtccttcgtccttggcaacaccctgccagcgcccagtggtggggtaaatgatattggaatttaaatttgaatttgattcggaatatgaatgggtgctcggatttaacgagcttgccgctgaattcatggcgcaaattaggcaaatggcaatgggctagctagaccacacactcgacttgtgcttatataaatcaagcttttcatgggtggtacatcagggtttggattaattttaaaaaggaacagaattcctaattcagggccacgctgaaaataatttagaagccaactgcttttttgtacgcaagcaagagtacttaactttatgatgagatttagacttaccttatttattgttgattgggatttataaatatattttgtatgaactgtatttctcaatttaatgttcaatcaatttttttcttacttcatgggcaaataatagtatgttgtacttttcactagcttccattgcttttacattaaagttggccttgatttctcgccgtgcattgttggtgctgctgctgctgcttcacacacattaacattaatcgtcatgcaaacgcacacatacccacacacacatagcacacacggcactcacacagcgagaaagttacgaaaccgagggaccagcaaacgagcaaaacaaactacgaaaatgacgaacgcgacaacgacaacacagcgacaacacaacgacagcaaagcgactgcggcaacgacgacgacgcgaagccgaattgaaatgttgccctcggctgtcagacactcacactcaaatccacacacacacttgcgttcgcacaagctggggcaagattataggatttaagatagcagcaatcgcacgaaaatatctaaagttcttccagttgaagtagataaaatgtatatgcattttggaaaactcgctgtgttgccattaattaaacttcggcctaagaaatcattgaaaaaaagttacaatttggtctattgagtaggttagtatcaattgcatttcggtgttacaaatgggaaagtattaaatagattttggtcaaactattgaactactctctgagtaaatatacaaatttgatcaaattttttaaccaaaatgtatatgggaatatatgatataataatttttgaattactttaacaatatatttgcaagcccttgaaagtatgctacgcttttagccgcaactgtttaccatacactcgtaactcgaagttcacgagctttggccctagttgttcttgcgagttgagttaaagtcgggctgccagcatatgtgtagttgtgcatatgtcttagtgcactggcgtgtgtgtgtgtgtgtgttgccaccatctgcagcatttagttaagttaagcaatgaagtgaacccaactgaaccgaaactggccgaaattgaaacgacgacaacagcgatgaggaatcgttgccatgcctatactatatagaatatcttcatatatatatatttatgtatatgtttgagtatacttatgtgtgtgtgaacggttcaagtggtgctgctgctggcttagattcccgtgcttttctttttttttttatgaatttttttcggtgccgtttctggcttttggttctggtttttggcgaatagtttgtcccggccagccagccaggaagccagttaacagggctctctctttctctctctctctctaactagctctcgctcgctctctgtcctggcgagtgtgtgtgtgtgtgtgtgtgtgcgagtgtgtgcgtgaggcaacttcgttgttgctagtggcattgctgctgccacttctgccactgccactgaaactgctgctgctgttggcttttggcattgtcaacaacgcggcacaaagttcatacaattgtgacacgcggcgcgttaagcacgtggctctgactgataacagaactctgtctgtctaaatcaaataaaaattaataaaaatcatttaaaaaatgccgcgtaaaaacagccatttttttaagtaattttttttttgcaagtgtcctgcggtgctgcgtaaatgtgcgtgccagtgataagcttcattgacctcctgaccccactgtctgtgatttttgttcgagtgccgcgagagaaaagtgcgtgaaaggtccgggaaaactgagcgattagctaacgtctggccataaccgtttagtagtcgccatttgccatttaccagcaatcggagcagtgcattcaactccatttggatgccatccaaaagaagatacatgaattgtaatatgtaaaaggagggtctttaaaggagtcatagcaaacgaactagcataaatgtatatataactaaatcaaacaaatctatgcacaataaacacctagaagcaatttaataacatcaataaatgtaaagttaaacactgttaaacggttaaaaacaaataaactaatagccactgcaccgtaactagaatttaccgaagaaaaagttatgaagtgaacttaaaatctaacgaaataaaaataaattattaagtttaatttagaaaaccaaagatgttatatttcattaaatcttaaagatttcactagtttgtgatattacaccacgagaacataaaacttttctcaaaatagcttactagtgaaacgaagtacctcccttaaaaatgttaataagtgttcactatcattattaaaaagtaaatgagctatcgagcacatataattgaagtaaatgtaatataatgattgggttattaaaaatgagctataaacattaatgaagtatatttaaaatcgagaacttaacgcaaaaaggcgtcaaacaaccacagcaatgagcagcaacaatggcaacgatcattcgcaacagcagcagcagcaggcgacgcctgccacatcagttgcaacaccagctgcagcagcaacaaccactgcccctccggaggctagtgcacctggatccggatcaggatcgggatcgggatcacaggcatcgcgacctgcaacggcgcctgcacgctccagcagcagcagcaacaacaacaatattgccaccagcagcaccagcttttacagggtcaacctgagcaacacgaacagcagcagcatcaacaacaacaccaccagctgcagcagcagcagcaacaacgctaaccaagccagcaacaacaatcaccatgagagcagcaacagcacattggtggtcaacacgagcagcactgcatcagctggtagcacggcagcaggaggaagcactacagctggagcaactgcatcatcaaccgccaccaacaacaaccacatttatgtgaatccgcacagctacgacagcagcaccaccggcagcgtgagtggttccacggcagttatgctgccactgccactgagtctcccgcttaacctgcaacatcagccatcggcagcaggagcagcagcaggatcagcatctctcgactcgcaacagcaaaatccgctgggtggcagcaatacgggcgccattagtcgcattggaaccatgaccggaactggcacgtccacatccacaaccctaagcaccctgaatacatatctctttccctgtggcgccgactcggccagcagttgcgatctggacagtaacttcagccagatgctgggcgccggcagtgagggtggcgcgagcagttccctcagccagacgacagcgccggcgggtgcgggtttgggattgggcgtgcagctagggctgggcttcatcaacagtcggcggcgcatcaggcggctattcggtgtgggagacatggtgccgccggtggcaacgcccacaccctatgcagccgccctcaggcggcgcagttcgcagttggtgcaaatgaccaagaagcgggagaaggaactagaggatctggagcagcagcagagaatagcaacggtagcctcggccaatgccgccttcctcgagcgccgcgagcagcagcagcagcagcagcagcagcagcaacagcagcaacatctgcaacagacgcagcagcagcaacatctgcagttcgccttcaatccattgcaacctgaagctgggaaaaagaagaaaaagaagccacctggaccgccggcgcacacgagacagcaatcatcgcgaaccatggacgatccaatgatgaatcgacccaggaagagcacacctgcggccagcaagaagaaggacaacccctatgagaagtacccatcaccaaaaatccaaaagcacccaccgctcttaagcctcacctatacgaaacaaaaaatgataaaaaaaaaaacaaatatcaaaatatctatgaaaattatgcggcaaaacaagtgcttctattaccatttgatttacgccatttgctgcaattcgtttgattttcttgcttgtaacgatttgaataaaacgattaagaatacctgcaaatacatagtattttaattagtttgaataccgctttgctttatcgcttctcaatgctttttcgccttgttgattctactcgcctcaagcaccaaagttgcaaatttaattttatgcccatgtgacactagttgcaacgtagcgaaatttgacaaagcttgaacttatttaaaacctttgccatttaaaatgaattcgtaattgttttaatttgctttccaaattttgaaatggtttacaaatgctttaatcaagtcaagtcgattgaaatctgaatagactggtgtaacacctctcatacattcgacaaaattaaattgataggaattataagcgagtgccacatgggcataattagcttgctcaccgagatttagccgtcccacagggcgaatgcgtaatgttcgcaacagcggaaaatgccaaaagatggcagggagatgcgacgtttttggcttggggtcagaaacagagccaagttgccgccaagtcaatgcccgaaagtcagacacagaaaccgtaaatgaatccagaatctataaccgaatctgaatcaacagacagtagacggcgccagctccaaactctggctacaaaaaaaaaaaaaaataaaataaaaataagcacactgggtgcaaaaaacaagttctgaaaagttcgcagggacgacgaaggatggcgagaaataaatgcgtagtcatctgtgcgtctaactggagccagcataagtcagtgtcctggcgattgagctatccttacggccagcaaacgttacgtatacgccaccgaaccggaagaaatggctgcttcctcctttgcgatggcaaatgacgacggttaattgccgtaggtcagcacaaatcctaactctcaactgaggaatctttgacagctgttttgtccccccccccttgccccttttgattctgggactttggtttatttagtcatatatatttaccgcctttatgtaatgccttggctttctgggcactggaatggggtgtggaattgctttaatgtggcttgcgtgtcgctgtggatttttgttgtgccctttgttgctcggctttcgtttctcctgctgctaaaaaggaatttatgtcaatgccagaagcgacaaacaacaaacagcgaaacagcagcaaaaaaacaataacagaagcgaatattataatggaataacggcgggcggggtgcatgtgtgtgtgtgtgtgtttgtatatgtgagtgtgggggcgggtgaaatcgggagtactgacttggccccaaaacattactctgcagtttcagttaattggcacggcacacactcgctcatttctggggcctatccccctttttggtggccaacacgtgggcgacaaaaaaacgagcactgagagaaaagcatatatatatcaaaatatatttatattatttagataacagatttcccttcgacttacaaaataacaataaattaaaaatattattaggcaggcaagttactaaactacaatttcattgaatttcaaaaacggttaccttatatacaatattcgtttataaagtcacattaatttcaagaccaaatatggaatttatccccacttagagtattttttttcagtgtaacgactcagcgctttaggtgtgggaagagtgagagcgagaacacgcgacgccagcgctgcgacatgtagccgccatttaaattgcccggcaaggcgacctcgtcaacccaccgcccaacgcccaccgctccgccaattcgaaccccttgcccctgccaccagaccgttctcatcccatcccccgcaccacttcctcaccatgggataccccaacgtgggaacagacccggaatgagacatgttgcccttgatttgtgtgcacggcatgtggcggcgtgttgactatttgcattgcatgtcctccccccccccccccttctccacaccatccacaaccacaccgcacacaaacacccacacatgcgcttccctttgcccgctggtgtgtgtgcgtgcccgcgcgtgtgtgtgtatgtgtgtccaataatttcgtaacatggcctttgtggcgatctttgcacagcgataagcgaactgggaggagaactcattgagttggccactcgcaacttattttacccattttttttgttttttttttttgccatatttttttgggccaagtgtaaaggcctttagcgaggacaaaaaaatatcatttggccctatgcaattggatgtatgtctaagtataagtgagtgtgtgtgtgtgggtgttgttccaatgccaagtgatttgcatttttttttttttgctcgcctaatgatggggtaattattaattattcgatgcctgtaatggccatcgtaactttcgcttttgctgaataattcccactggcgattgcaaagcaattgaaaaggtgcgcagaaatgtgtaattaaattgtatttaccgacgaatcaagtaaaaactattattagtttgacatgtttaagggcagagcagttgcggttgacctacattttctgagccattagtttaaccattaacttggtttttttttttttgttctagaaggaataactaaacattgaaatatttaacttaaaaagatgacctactttttccgatctattagtttaaccattaagtttgatttttattttagaaggaataactaaatattgaaatattttgtattctctaatattatttgcaatacaactagcttggctcaattaaacataaaaatcctttttttataattagcctgttacgtagtaaatgtgtgcttagtgtccttcaaatggaagaaaatagtttctgcgaaggtttatattggtttttttgtgccagccacttgcccctttaaattaaaacaagaacttaaatgtgttttaagttgtaaaatttaaaagtttcccccgtgttagaaactcttgaaagtttccttcaattaagctgattgcttggccaagtgtttaccatttggttgggctaataatcttggcaacggaaatgaattcaaatttgcaccggctttccgcgaaggagaaggcgttttttttttcattgggcctcaggaaaataggctacgaaatccattcacttataaactgcagcaagagcggcgactcgcacacacaactttaccgcaagggccaccaattagtggaggcacaacccagtcgccccatgccaccccattgccaccccattgccacctcattgccacctcattgccaccccctgcggcagcgaccttgaactcgccggcaaatcgaagcacgaaacgaacacaaagcgaatgaaagtaaaagttgcacgtgcttcgtcttctgcggctggtgctttggctttgcttttccagcttttcctgcctgctacttgcggcagctgcatgcataatgtgcaaaatatatgccaccacccaccgcccactgcagcgcccgcagccatagccgcttgggcgcgaaggtcgccactgcaggctagatggctaaaaaatccattaggccctgttgatgaacctgccccacctccggaaggcgctgacgtcaccgaagactcacctgtttctcacatttctcttaccacctctgctcacctggcccttttgtctttgcgccctgcatttacttatttattgagcgctgcgacaaaaattcgcaagaaatatacatatatactcgtgtatatgtatttagtggcatatatgtgtgtgtgtgtggatgtggcaagggggcggggcgaagtgacgacgtcagcagcgatttatttcgcgacagtttgtcgttcatcttttttttacgaccgacggactctgagattgctgttgtcatttatttgccgtcataaactttcaatggaatcacgcaagcgatttttgccaacttttctcatacttatccttcgccgcccgctgctttcttttattgtgccgcatatatgacaaaaatgtgacagcgacagcaggcatattttccgcccatattttccatttcccattttccattttcctatttctagccattattgccttcttttttgctcgtttatttttaaagcgggcaacgcattcgcagacccattttcccattaacttcccgagcagactttaaacttctggctgatgttttgcatgtttgacacacaaaacggggacttccccggccaaaagggaaaacggagccaaaaggcgaacaataagcaaattggccaaagggcgaacggcaacaacagcaatcaacagcaatggcaagttccaagttccactttcgatcgacagcgaatcgctgatgccctgactttaaaatacatattcagatggcagggcaagtgaataataattctaacgattgaacatattttacttggtgcaaccttgcaccataaatggacaatccttacagacccttaaaaatataacttactcaagatatttcagatgcctacagtttttgttagtcagttttcataataatatctataaacataattaaattgaatgtgtatatgtgatctaagttacatattttgtattaaagaagtattactatcatacgctatgtaccagatctttaatttgctcctaatttctattaaggtaacaattaagtttaaaagcaaattatttccagaagtgtttgggaaatcttaaaaaaagttgtttgggttcttaagatatcagcccatagatactaccccatatgtcttattgaactgacaaaaaagtgagggcttcgctctagtcgttgcacttggcactcgatgttgcctgctgttcttgcctccggcctgtgtgtgttcttgccccgtataaataacatttttgtcaagcgcctcgtatgacaaagtgtcagttataaatgtgttgcacacacactgaggcggccactcgaacacatttgtacatacatatacatataaatgtgtacgtatatatgcatgagtatgtttgactaggcctattgggcactcaagtggctgcaattgctgatgttgctgctgttgctgttgctgttgctgctgctggtgctgcagttcaaacgacaacagcaacaattgccgcagctgctgctgctgccgtcgactttgctgccttgtgtgtctccaatgtctttgattgttggcgttgtggcaagtgttgttgttgctgctgctgctgctgctgctgctgcctttcggcagttggatgcccgaaaattgtggcgtctgcgttgcccttttccacttgttgttgctgctgctgtaatttttgaaatttttactgcctagtcgttcgattgttgttgttgctgctgctgctgcaacttctgctgctgctgtggcgacaaatattgttgttgcctggcgtttgaaatgagtctgcccttttgtacttgttggttttgctagcttttgctttttatatttttcggcagtcaggcaaaacattttcggttctgggtttctggttttcggtttttcggcctgatgttgctgccgttgcagttgcagttgcactcggcgcggaaagcggaagcgttgcctgctcctcgctcggtgcggatagaaaaatttcagaaaatagtaatcacttccagctgctgtgtgtgtgtgtgtgtgtgatctggtcctcgatcctgatcacggatccttcttacccatacccataccgataccgtgtgtgtgtgctgctgcctttcgctggcaggataatggccatcaacggcttcgggccgagcaaaacgcattctggccggccagcggattgccgttctctttttgttcgagtttttcacatttttttcacgtgatttgtgcctgattaagttgtgcattgtggttaagtggcagttaagttgcagcaacaacagcagacgcagcagcagcatccgcatcagtattgccagctgcctcaggatgttcgtggtcaatgccatcaaggatgagatcgaaaaaatgtaaatatgccgggatgtgttgtggcctcccttggtcaatttttccatttttcttgatttcgctttctcaggattcacgcattgatttttgatccgttttctttttttttttttgtgttcaaccctcaacgattttgtccatcagataaaattagaaattaaaaattgatggggcaaaacaatggtaaatatcagtagaacagctaaattatgcagaattcctttatttgatttgatttattgcacgggcgggttaaaggggatttcccactcgcattttccttctcggaaaatcaattgatacgcaaattccgccccttttttcccccttgcaacaccccctccacccatgacatgcttgtgttttctgtgacctagccaaaaataaacttcattgaccgcttccactttgctgtgacgctagtttttaaaaagttcatacattttgtggaaaactacccaaaaaaaaaaagggggacagaggtgcaagttctggctaacggaaaatgaagctacctttgttgcactgcaaaaagagtttcgaaagtcaaaaaagctgaaaaaatgaccaactcagtttgtgcttattgaaaatacgagcttattgggttttcaagctgtgagaactagcaaaagccaaggatgtgtttttagatttataggtcaagacgtttgtttgctggtcttgaaactggtctttgaagcacgtacatatgtacatggtatacatgtgcgaaaaacatatgtgcttatcgataaattgaatccataacttccgtccattggacaacatataatttccattattattttctgtttgtgtggccctcttttgccccagcaatcgccagtcaatcgaattgattgatgaacccaccgatggccaccgaccaatcaatgtcaattgctcttccttcttactttttgctctacttgatttcttctctttatttcgcctgccaacttccgcttccctatcttcctcccctcttgccccctctgcccctctcgctttccatctttgtgtgtcatgttcctgctccttctgtctgtccgtccgtccgtccgaccgtccggctgtctgtcctgatatctccttcgacttttgctccgataaccaagtttaaacgtcattagaacactttgcgtgccatgtttgccaccaacacacacctaccattttggcactgcaaaaaagttatctaatttttaaactgtaacgtcattttaatttcacttacacattttactcctgcaaatacttaatatacctctgccttgtcttgattacttgattacattctaaagcttaagattgcatatgtatgtgaaatatagactaagtatacatattttatatatatatatatttttatatacctataaaattgtgttcctatgcggcaaggtacaaatctctttcgatgttaaatatttcacgagattcgtttcattttttcaagtgtacttcgttttcttgcaacgcctccacgttcgctgcgttccagttcctcattgggtttcggtttcaatttcgtttgccttctgctttttgtttgtttgctgtctgtggcatttggcgctagtctggcggccattgcctctcggttttgtttagccacctcagtttgatggctaggtggcgatacacgtatgtcttgcacttttgcctaagcctcaagtcgttcgaaagccaagcgctaaatgcatatctctgtgtcagaatgtggaacagttggctataattacaaacactcgcacacacacagagacattcggacacacacacacacacacgtacagatacggcacattgttcttgtaattgtagcaactgaatttggtagccccgatcacttttcacctgccgtctgaagtcgcaagtcgcaagtctgaagtctgccgtttaccgtctgctgcctttcacctttcaacccggtgggctgacaggtggcaaaggtcggagaaacggaaaagggatgatgcggtggcagggggcgggtggaagagcggaaaatgggaaatgtggtggttccggtggcgccaaagaaacgtttaacgttttattcccattctcattttcgccagtttcatttgcattgtttgccatcgctccaaagtccttccacagttttagtaatcaatttttgttcttgcttttgttgcacccaaatgctgtcgctatcgatgtgtgtgtctctgtgtgcgtgtgtctttatatcagtgtgggtgcccctgcctgtgtgtgtgtgtgtgtgtgcgtgctgggggaaagctggcgaaaatgtggcatcgacacagccagttgcataaacgtcgcagtcgcacgcggaaccagtcgagagtagcaatcgcattaaagacccatttttaatgttttaatccgggctaagccattgaattatacacacacacacacacatcctgcgagtccttgaaatggcatccaattcacaactcgttccacgctcacactcacacttgccgaaaagcgtgctccttcatcttcatcaaaggaaatcacaagaaataacaaacaaatacgtgtgtgtgtgtgcgtgatgctgctgcactctcgatagttgcctctctttcttttttgtttcagtgcctgtgcgcttgtgtgtgtgtgtgtgtgtctctctccctctcttttaatcgccttcgctctctcttcgggtaacttaccatggaaacgttttggaaaaatgtgaaacatgaagattggactttccctatagccgctttcaattttgttgtgatgctgcgttgagtttccgttcgccagttgccatcaccataaccattatctttaccgttagtgtttgttcgagtgcaatagaggaaattcaatttccaacaatccgcgattttgtcgtttttttcttgtttttttttttttgagaagtttccccaacatagttggccaaattcgataaatttcagttacttgtgcgtaatatctgtgcaagtgtgtgtaacaataaataagtgccatgcggttaatctaagccattaaaaatagaattcgtgatacagataacagagttttcgtgtcctccgagcataaaatattaatgaagttacatcagatcattgagaattgggcccacttgataattttgttcaactttaaaattcgctggatacatattctattgatttttgaagtatgattctaaaaaagttaattgctttttcctttttttttgtagatagtgatttttaagccatttgcgtttgaaaatgttgacattaaattaatcttgctgttaaagtaatgaattatatttggaaatcacactaaaacacaattttgttttagtttattttatatatattagagtgtcgcacttatttttgtaaacacattttgcttcatagtttcaaggatgacaaatgggcattcccaaaagcaaaggacttaatatttagttttgtgtgcagaaatagttgtgatttattattttaattgctgaaacatagaataaataaatggattatttattgtatgtgtgcactaagctaagtgtttaaataatagttcataatttattttgttcttgaattgatttaggatttaatgtttagttttcgattgttgataaggcaagcagatttattggtttgtttgttttcacgtctgaagaaattccaaaacttaatgattgtttgtcaaagttattaattagtttagtttagtgcagacattaaacactcaataattttgtgaaatgagcacaacattttcacttacttgcaagtttcagctgtggataatttgagattatttagtttagtttagttttgtttactcgcctcgcttaaagttgcagatgtgcagtgctgtataaatatttgtttgtttgccagttgcaacacaatttgcttaacttaattgaaacaaagagttaactcagttcaacactctgaggcagggtcaaatgctgtccgaatcgtattaactgtaaaagctttccatagtccttctttcactacgctacgttgcgtccaaacatcgcccacatggcccgcccaacccactggccattttccacccacctccccttccccgcgacgccgcctaaccattttacacgttttcccgatgtcagtgtgtcagtgttacagtgccaaagccgggtccatgtccgtgtttttgtgctgctgtctgtgtccgtaagatgccgacattccacgaagcctttctccccctcccctctctctctctctttctcactctttctatctatccctctgtttggcctttggtgccatctctttctgctgctgggtagaaacgatttggcaattggaacacggcagcacattcacattttggaccgcgctcatttcgcggcattttcgttacgtatacgcaatgtgagccggaaaggtgatggggaaaaattgttaaattaaagcgaaaaaaattaaagagaaaaatatagtaggatttttcgaacagatatatggaagattgtgtgtgtatgtgggattatttagaacagaaaggtaataattttgtgctatgtgtatgtgtgttcatgtgccccctagttaactgccatcgatggcccggtgtttcctttattttccctgtctccggccaaatgtaaacaaatttcaataatggaaaaaatgcgagcaaggaaaactgtatgtgtggcagtgtgtgtgtgtgtgagtgtgtttaagtgtgtgtgtgggggtcaggcgcatgtctgcagcagaagaaggagagcgattaaagcagctgtgcgaagttctcgttttatttacatttattaatattttcgtcttttttcactcacttttatcactctgcgactgtgtcactgtgtgtgtgtgtgtgtgtgtgtgtgtgtgtgtggttggatgtgtgtggctttgctcttgggaattgtggcgtcaccatggcgtatgcgtaatattttgttttgtaattatatgcgcggcgggcaaacgaaaatttgtgtttaattaattaattgaagcgcagcagcaacagcagcaacagcagcagcagtagcaacagcggagaaagcgtttttagttgaccgcgtggcgccaacttgagcgcaactcaacggcagctgccccgcaggaatggttattttttttttttaatagtctacatatacacctaatgtatatgcgtttgtttttttttttctatggtgctcagtcccaaaaacagctgcttgccacagctgagtgtgtgagggtgcgtgtgtgtgtttgtggaagcgagatgggcatatataaatagaattctttccgccaaacaacaaaacgaccttgccgccagaaaaacaaaacggaatgaaacacgcagcggcggcaagtgataaatgggatgcaagaatctcaaataaatgtatcaattacagttttctttttgtagtgcccccataagtaggctatacgtttgccccaaagtgcattcacttaacaaataaataaataaacaaacagcggcaattggcagcaacatgtggccaaaaccgcaatgccaatgccactaaaatgtaattgtaacaactgaaaaaaccaaaccggcaataaaaacgacaaaacccacagcaaatcaaccgcaatcatcgacgacaataaaatcgacaaataacaacaattcaaagtgaaatgaaattttagtttaattaaagggtcgcctagctgtggatcatctgggcaattgcacttgcttaatttaaatataccgcattcaatttcttagccagttcatttcaagttttagtttgtttgtattaatggaattataatgaatttataatcagcaatgaaatgaaacaaattccaaataaaatcctttaatacatgtaaattaatgcatagagttatttttcgttaaaagaaataattgatctaaatttccgatcagaatagaatgatattaaacattcgtgatttttgtagctgcttttcgaagtatacattttctataattgtttgtgcatagtcagatctgcgatgtgcccagatcatcgacgaggcccccaaaaaccgatcaaatagaatggcaaaccaaaataattaaaaagtgattaaataagttaacaccaaatgcaaatgatctgcaaatggcaaacaaacgagcagacgagccacagacaacgcttccaggtcgtgtgccaccttacgttcgtgcagcagcagcagcgagtacagtgaggcaaagctaacagcgacgcgcgatacgcaacgcgggattatcggcgcccgagaggccaggagcggcccactcggtggccgtcatgcagctgcaggcggccggggcccaattaaccagcagctgcatttagctcacccattgagcacctagcaaacacatagaacacatacagtcacatactagacacgcacacacgcacgtacacgcacacacacgaacacatacagatccaattaattggcaaggattcagtgagctcaacgaagcagaccagaactagaaaaccgaaacagaaagccaaaccgaaactgttacagaaactgaaactgagaccatgcagatgatacttgttgctggcgggtaagtgaaaagacaagtcccaacagcccacaatccaccccccaccaccaccttccgactatcctatccaaatccaaatgcaaattcaaatccaaatccaaatccaaagccaatccagaatacgcaaccctcgatgtgatatatgtgcctctgtgtgtgtgtactactcggaactactcgtactaacttaactgcaaaatctgaattgtgtatgtaacccatgtgtttacctagccggaataaaagttgccaaaatcatattctttgtatctatctttagccgtaagccttgacttgatcggtcagttctatatgccaaatcattctgtataatcatgcattaatagtactctaaatgcttattgtttcgccttatttgccattcgcactcgttgccgccaaatgcctttgcttggcacatgtatctagaatctatagataatgataactcgtaacttgtactgtgtattgtgatcatatgctgatacatatacatttaacaatctgtctaatcgctgtttttctttgtttcctatttgcaatactccacgatacccacgatgaccgaactcgatatgaactaataccatcaacttccaggtaagtcacaaaatacaattatctaaattggaagattgtgtgggcttaattctataaggattttatggaagataatctaaaatcttaaactattattggtaaaacattaaaacaagtgtatatatttctctgcaagcattaagtcattaaatagcaaatgaaaacatgaggtgaaatgtcatttaacattaaaaatctaattttctgaactgaagaattataagtactgcagcgactcttagaagattgctcaaagaggctaaagtatccaaaatgttgacaataaatcccaatcattcaaaacctatagagtttaagaaactagtaagtgcaactgttagaactaaatgagcttttatttttaaacccaaaagacgttcttattttagtttattagaaagattataacattttctggataacttcgtctcattaaaaaaaaatatttcaataatattagcttttctcccttcaataaattgtaaaatgctatttggtaaaaactattaaattatagttaaaatttcacaaacggttgtattttacaacctaaccaacttattctccaaatgcttttgtgtggctataaaaggtttgcgttccgataaattttcgtccaataatttttcaacgcaaaacctgcattagcaaggacaccaaagcttaaagcttttctgattttttgaaaattgaagagcttaaaagcttgactaaaacacaatttctgatttgaagaaaactttctgatagcttttaagctgggaaaacaaatagctacgtcaactttgttgaagcagaagccagagctttaagctgcgctttatccagctttccgtggcccttttctctcgctttcccttatgttttcctttccgaactttcccatgctttgtttgggcgcgcgtttgtgtgcgtgaatgtgccatgtgtttatttattaataattgcattactcatacgccacgccgtccctcgctggaagcatggcgttcaagtgcacacgtgacacttatatgcgtgtgtctgtgtattacttgggagcctttacatggccatgtgtgtgcgtccgtatgtgtgtgagtgtgcagttattcgcattattataatcaagtggagccaacaaaagggaagcgaaggaataggcttcggaaggggggagcataacgagcccggcggcgttttaaagcacacattaataatagaggagcacacctttgccaccaaagggtggtggtgatgcggtggcgagttggagggcatggggttgtggcttttgtcgtttctccttcgattcgattttctcttgctcccgtgtgcatgtgagtgttagtgtatgtttgtgtttggttcatttacagttttcacctagttttcgtgtttcggttgttttgccttcggccgccgcctcagcggcccctagcggcatttgctttgtttgacaccgccactcatccccgccgacgggcccccatttccagtccagccaggagctagagctccatctccagcggacggtgcccgagtgtcgccagagtcgccagtgtcgccaatgtccctgtgcccatggttcccgctcttcttgctcagccatgttcacccaggctactctttggctttgttgttgcggctctgctttgttgttggttttcattttattcatttcgtttctttttttttttttggttttgtgttttttgggcctcctctggtcgccgtgttcgtgccaagtggcactaaaactatttgccttttgcccagttttcgtatgcctttggccagcgggaacaggagcggtacctgccacacagcacagtacagaacatcgcacatcacacatagcacacactcggcacacacagaacacagcacgcaacacgcaagaggcgccatcggagtcggagtgcagcagtggaaaactccgtatagctttagatatatagctatacgatccagtccgctgacaaagccggagccaatgcagcaaagcaaatcgcacgtgctcgcctcggcccaaaatgttcgtggcgagttcgtggcgcccaacgtggggcgttcgtgccaccgcatttggctcggctcgtagttcggcggttcttctatcgccggacacttttgcagcgcctcagttcggttcagtcgtcgcagtcgcagtcacgtcgtcacaacgtaatcgtgcaacgcgttccgcgcttggcggcgactgtcgtcagtcagtcaatcaatcagtcagtcagtcagtcagtccgtcagtcagtcggtcagtcagttagtcagccagctagtcagttagctagtcattcattcagtcagtcaatcagtcagtgtgtcaatctgacaattggagtttctatccagacttcaatatttttttacctcgctcaaaaccccccactcgcactttaaataataaaaaaaagcaggtggtgcgtgccgcgtagccgcgcgtgattcttgttgttgttttttttttttcggtgaatgtgagtgtatggttctctttttttaaatggtaactcttgttgttattgttattccgagcttggtgcgtgccgcaaaattcgaaacacaaggagaaactccatttaaaaaaggcgtttaaaacagcttaagaagccatttaagcacccttccacgcgccacagaaaagggatgagaagagaaaaatacaccaggacatgatcagaggctccaggggaatcctggagtccctccaactgtatcgccctatctccgactgtttctgtgtttgtttaccttaattaatgcactggcaagcggcaaatggacctggacactgccaacataatttgcctagggggcgccactcgaatctacactgctgcagcctccggtggaatgatgattctgatggtagtggtggtggtaggggattgtccacgccaacttagcccactgcaggtcgagttaattaatatttcactctagttaagggggagaaagtggaaaatggtagggattggtcgggtgaagtaggttgaagtaggggtaagaggcaccagtgaagttttgcttatataagcaacttcaattcctattgccttgtgccatttccattcccattcccattcccactcccattgccatttccatttcagtgcaattcgagtggcccaaaagagccagaaggagcaaaagctgtagcagtagcctaaagagaaactggcaaattgctcatacgacgcattggcgccgtcaaaaactgaacgagccacaaaagcggaatgaggagtggaatgagcagccgaagctgaaagaaaaacaagttgacccaatttacaattgtaaatcaaacttaaaatcacagccaaagttaaacaaaaatagaatggtggtcagtagcaagaagggcaggcatgtttaatttacaataagacagcctcaaggatcgaattcagagatcaattgaatgcctcgaaattaaactgggcagtggccttaatatttgaccacaaatgaaggcaacgtataaattttgtatgtcaaaaacaaaaacccagaaacaggaactgcattgattggattaatggcttatgtttcgttgcttcgaccgttttctttccattgtcatagagagcatatataaataataaatacacgggcttgcaacacaattgtgggtgaaagcaggcttttccagcaattcgagcacctcagtatgcagtgaaaactaaacagatgaacgcaaacattggagtaattatgttggggattttgaaatgcattcattttgtggtttcatctttcagcagagatgagaggtttaccataactttgccatccgtattgtttggcaagtcacttggatatctaggaaaactttgggccttccgcccttcgctttccaccaaccacccagttttcccatacaaattagtttggatttggattctcgctctgttcattaatttgtctaagagcagctgaggtttttccccgtattacaacttgagcacttgggcatgtgaggttattattcagcctcgtctttgtatttttgtttaagcttcttttgttttcgctcctcctattgttttcctctctatgttccccgctttttttacgcctcatgttctcattgtatttgcgattaaattcaagtttgactcgcacacgccaaaattaattgggcacttgaaaagttgaacaagtcgatcgaaaggggggcgaatggttgcaggggctagatgtgccgtgacggctcgacagctcagccttctgttaacccttatccactcagtggaaagtggcaaggggaaggagaatgggtgggaaacccctttgtaatgttctaggcaactgatttattttgattgaactttgcatgcaagcagctgaggcaacaggaagaactcctgagctttcgagcaacaactggcaagtgaaacatcataaaacaaagccagtttgtggttgaatacgaatacgagcacagccgcaggcttggtcttgttgatgggttgggggggggggtctggttttatgggggggttactactagattgaggggatcggaggccattcgcacgcacattgcctggtttttaggcggcaaggcttaggcttagctccagctcaatcgtaaatgcgtcgagtgtggttcgttcttctccgcactcttaacccctttgtgccaaagctgctcgccagtgtgccagtgtgtctgtgtgcgtgtgtgtgtgcaggctaagtggttatggcaacaacagcgctaataaatcccctctgcacacgcctctggtgctcgctaagctctcctaatgccactgaggcaactcggctttgtctttcgagttgaatttgcccagtatatggcgcatatatcgagtgcctttaaagtggtcgtctgtcttcgcaaaaacatcagcagcttccctgattgaatggtggcgaatttttattcttgccacaactcgatatatctgccaactgttttgctccattttgtctttcctgccacgcttggccatttagttttggcccaattgctaacttacatatgtatatatttatgcgcatatgtttgcggtcgggcatgaacacacacactacaagaaaatttggccaccaaaaatatgcacagagtcgtattttatatatgctatatacttggtgactttatgcctcatatatatatatatatgtatgtagtatatgtcttccgcaactataaaacatttaatgttgcagtgagactttctgatttcctttacaaagtttttaaaactactttaggggcttatagaaaaaaaaatggcaaatacttgctttagtatgcacgttgattttattttactaaaatgtaacgaaatgttccaattaaatgagcctttagatagttgacctttggcaatcccgaacttaaaattgccagggctttgggtgatttgtgttaacctgaattagttctcagtgtgccatctatctatggatattgtaaattattcgcctggatccggaatctcttgccagtggattttggtactccggccagaggctgtgcagctcggctccgagaaatgtgaaatgtgaatttcgaatggcaaatggcaaatggggaatgtaggaagtagaacggagaacggagaaaggagaaaggagcacagagaacggagaaagttacgcactgcggcgatggtttttgggcttttaatatgctgtcgagaggtggaaatatgtgtgtgtatgtatggatacacggctgtgtgtgcgtgtagattgcacgtgcgctgcgtgattttaatttgaaacaaacatagccagagcacccaaacacacaccaattttgcgttccttttttttaaggttttagtttcttctctactctttttttatatttaattttgttcattttttttgtggccccggcttttcacagttttatttgggttttccgttttcgctcggttctcattcctatgtttttttttgccgttttatttgtttttttttttttttggtaattctttttacgactcaacaagcagcagaagtataacaaaccaaaaaggaagaatacaaaccaaaaaaaaaaaaaaataaataaagagaaaacaaatagggcgggtggcacagagagaacatttattgatctgcggccgcttgaagccaatttgaaggtcaagcatacgcaccgtggtacctccgagatggggccatcttcgcagtgaacgagttttgcagtgttacataaaaatatgcaagcggcaaccaatttccctacaccccaccccattcgccaccccgctcgtgacgtcatggtaaattattttcaaatttgcgcccaaaggccaaacaagaagcagctgtgctgcacaaagcggaaacggaagtagcagcaaggcgacaggaggccacagcacggcaaacatagcatacttttcagggctctgtgggtgaaaggccgtaaggctgtacgaagtaaggatgtgcggattggaggactgaaggctcccaggcttggagcctgtaaagcagcgacgactgcagtttggctcccgctgctccgcttgttgttccgtgtcaaacattttcatccacttgttcgcattatcctgccagacagcgcacagcgggcgagggcatcaaaagatgccgccagcagcagtagcagcagcagcacaaccagtggcaaaaattgttacaattgccgtggcgcatgatggttacgggggctgaaagccaaatccgtgcgagccaaacgggcgagagaaaaatgaaaagaataaaatggcaataaacaggcaggaaaatgggcctgataatgcgagagctatatacactttgcatgccatgctatgcgattgaagctattaaaattcaagtagttcacttttcctttacaaaatccttgtccaaccagctatgcaaatgggttcttaataatacgtcattagttcattgattcaatctaaggcaagagattaattgacccttgttagatgtcccatctaagtcgataaaaacttcaaaataatctcatttcaaaggtgtaattattttgataaaatcagctcagctgccttttaaattccacgtttcgtttcgtttcctcgcttcaaactgcgaaaaaattgatatacctacaaactcataaccaacgattgaatagaatttcctattgactgcactctgaagtttatcgttagcttccacagaggtggagctaacactgggattatcccctacttgcagggtattcccatcaagccaaaaggcttttcttgccaacccacccccccccttccagccagcaggccacgcccaaccccaccgcccctttccaagccccagccctcgtgaaaattctttgcgaaatcatgcagaaaatcgctaaaacccaacaagcaactgaagctaactgaagacggtggaaagcacgcacattttgctcgttttcctcgttgctttttcgcttttgttgctgctggctgggtgcaaaaaaatttcattaatgcttaaatagaatttcgaatcgcatttcgaaatcgattagcatttgtccgtttgcttgagaagtcaggaaggcactggatatgcattttaattatgcatcaggagccaggcaatcgccactgcatttggacgccttcaatcaggctgtcaaatgaaaatgaaggtagaactcgttttcccccggccactaaggcagtatgaaattaatttcagtcacataaaacagagatgattgcatgaattcaaaagaatattctgtttggcatttcaagagtacgagtacaattggcatcgctcatccgccaggtaatcccagtgaaatatttttaagctctctgcactaaagcatgcaaataatgaaatagctaaaacgaattcaagacttttaagtcaagactaagtattcaggaaatatgaaaatgaggaatatatacacacagattcacttctggcgaagtgctcaacgttttagattccagctcaagatctcggtgccgctaagtgattttctcatggtgggcgcttgtataaatacttgagtgccaaattaggcaaaaataaataaacaattggccaagaaaaagagagagagagagaggggggtagagagagaacaatcgcaaattaaataaaattaattcaaatggcagcggcggcagtgccaagagcaaccacaacaagcaacagtaaaaatgagctataaaaattaacataaaaatgcgcgaatgtcaggccaacttgggcttctatccctccctttctcttacccattgtccgtcgccctttctctcactccgtctgtctcccacttcgctatgtgggtctataaaaatcgtgttgtgctttagcttccgctatagctatggctttagctaaccctaaaggccctgcgatatacccacaacgcttcaaaagcggcaggtgcaacacaccggtctgtccaaaaggaactttccttcactcgccgctgctctctttttctgctttttcatgcttttttccagctttttggtaagcaaaatcgatacaaccacagtcgaggaattagaacttggccaacacacacacatacattcaggtgtagcacgcggcaaaaaacgaactgcaaagccaaaggactgttgttcccctaattaaactagaaaggccgaggctaaggaacaaaaaaaaaaatggttatcttttcaagctgactcccattgatttccactgcacttagcgtaattacatttttgtgcagcttgattttcgtgtgtcaatcgatttgcatatgccaagaaaagttcatttaatggaacgcgttacctgtccattttttttttctttcggccgagcaaaataataggaggaggggccaaaaactttcgatcaactttgaaagtcacgtgcccgaagtccgagagtccaaaaatgaacccagcccgagtctcagtttacaaattttcaaacttgcaccggtaaaagagttggaaattgtcgggaaatggtgcgacagagagggagagggagtaagggatagagagcgaaagagaacaactcatagacagggactcaactcaactcaactaaactcgacacgaaactataaatgttaataacaagcaacattgttactagttcctcttcctctggcgcttcctgttcgcccgcttttagagggtgtcctttgaggcatgtcctcgcagatggaatgtttctccgaaaatgacagtttagctacctcctaacgagatcttttcgaggagtagtcacacaaatccaacagattttacatcaaagaacaactcaagctcctatgctgaaagaattgtttcgaagctgactaaaagtgtgcagtgaaaagatgtaatacaataatgttgcaaagagtatgcaccaataagctatattacaattccaagtaaaaaaaagggttggattgcctttgtagtgggtattcgtagagccgttagaagctttttagtggcaaacttaattgttcgcctgtatcctgactggaatacccgagttgagtccttgctcttcttgttgttgttgttgtttcaactattttcctgtatttgtttttattgttcgctgctggtgctggtgttggttttgggtatgttagacaacaaagttttaatggtattagcaagccaaaaataacacacacaaaatgttaccaacaacaatgttgaatttgaagcgagaagagtaacacacacagtagtagtagtagtggtcgtagcatggcacaggaaatgaatgaagtgaaggaaatgaaaaaatccattgcctactttttggagccgaggcaaagagtttcccttgaatttcccacacttaaatcgaaattatcgtaaattaattgtgaaaaccctggccaaaaagaggaaagaagtgacgaaagtcctggtggtaatataccaattcgctggtccttttctattattttacctactatttatttcatttcttttttttttttgagccaactgtctgcgtgcctgtgtgtgtgtgtgtgtgagagctgtggtcagtgcatatgtgtgagggtgtcgtactgtctatgttagtgtcaattatctgtgtccatgtagacaagcaaagtaagctttttggacggcaaaaaaaaaaaacacacacacaagggtaggcaagaggaggggaggtgacgggagcttggcaagcagaaatttaactttgtcaacctttgcagttttatgaatttcaaggccccccattccattcaccaaatgagtggaagtgagaggttaagagtggaaaattagctgataatgctgctggctcttgtgcttgtgtggcttttctcgaggattatgcgatggctttcagggaaaatttgtggaaattgtgcaaaattgagaaatacacacaaaaggagcaacttcaaagccgcacaagttagtgcgagcgcgtatgtatgtgtgtgtgtgggcgatgaagtatggaagaattgcaattttaattcccactaaaaatgaatttattgagcgtccataaacaacagagcactgaaaatgtgtaaaacaaaaccaaagcaattgccccatggaaaattgaaataaaattctatttcccatttgtttacacattgttcatgaaatatatatgcttgaccaggccaaatagaccaacaactcaggccgcaaccacaatctgtacatatatacatatatatatatgtatatatatacgtatatttacttagattccggacaaaataaatggttgaaaattgaatgctgaaaaaatgtttatgcttttgaacttgctgttgttttgtctactttttttttttgccgaatattgcatttgcaaatgcttgcatatacggcatttgcatttagaatttcaattaaaattttaagggcatttccatcgtaccaacgacttttgctgccatttaaggtcgactttatttcgctttaattgggtaatcatacacaccattggggcaattcctcatgaatcatttcctggttcggattctgacatctagcaattaataagtccaaactatgagcagggcgtgtaggttaaagtaggctaaaattttcaccgcggcttgtttacacaccaaatgataggggttggttggttggttggttggttggtgggtggctgtgcggtggtttgggtggtgcaggtgcctaaggggaatgaccaggcacgcacacaaataccacacacccaccaatcccccctcccgatccgaaccaaaaacaagcccagatcgcgttttttttctttccttttttttcccgcaagtttctaggaatgtcagctttgatatttgtcggcgcttgtctgtcattttcaatttgttgttccctctctatccctgcctgcctatcgctctctctttctagcgcggaacgtggccccaacctttgaaccactggcagacccttcatcgcattggcatttccgctgtcatttagtaatcgataaattttgtatttgccttcggtaaatgcttctcgtttggctttagctcttgtcaatgccgctggccagcgatgcaaatgctttccagctcccctggcaaaactgttccgcccgcattttcacatttccaccggcttttccatattcacgcctctttatacacgttggcctggcgaagatttgcgcgcagtgcaaaaaattaggcagcttcaccaattgattttcatggaaacatggaaatcatacgtaaatgaattcagctaaataccaactaattttgctaaacgaagctgtggtttcaaggaataagtcattttctcaagtcttaatttagtatacacatgtgatgacatacataactagattagctttcaaaataccttataccttactattttcattacattattatgatttggctcatatatttaaacaaaatactaagtttttgtgccccgtgcaccttgggtgcatctgctggcaaatcaatcaatcaatcaatcaatcagtcagactgtcgtgctgagtggatggaaaagtggaagcgaacagaaaccgccagaagcgcaacggttcttaccccttttggctaaaaacgggggggggggggggattaagcagccaaaaaagccaaaaagccgatccaatccgctggaatgcgaagccccctggtgtcttgtgtgtgcataaaacaataatttgtgcataagccaagcgaaaagcgaagcgtttggaaatgtttatggcaccggcgggaatcccgggcagctccaacaatctcaactattccatctttctatatacatatatatatatactgtataaaatagcacgagcgagcgagatggcacctggggccatccccaaagagattcttgtcattagtttgaataatttatttctgtgtactttcaaactgagctcacagttttggctgcaagcgttatgtcaccgaactttcaatgcagcgccacagcttaacccattaaatagtctatcaggatgtggatttgaattttctcgacaaatacgagagtttgtttatatataaatattgcgtagaaacagaaaagcacattggtttcaaataatagaaaatagtttctttaaaggccagaccaaaggcattttgtgtgctttatataaaattgggtttacccgcagtagttaatgttaaacaaacaataaaactggaaatttaactaagcaaatttgttatgctgcgtgttcttaggtttctatttgtgctaatgcaaatttgagaaaccaatttcaatttgcccaacttcatatagcatttgtccccattacctgtgtttccaaaaaaaaaaaaaaaaggatgctgcaagtgcattaaacgcgcattatacgggcggccgttcttctgctttttcgcagccacccacaattttcgccattttcctggctttgttttattgctttcaaattagcgcagaactcaattaaaggcaaaggaagtggagaagctggtagttagatggttgggtggctttgggtggttggttttcgtcgttttttgtgggtggtgcgtggcgtgtgtatgcgcttcaacgcgcgttttatacacccacgcaccaacacacacacacacacacactatatgcagctttcgcatttaatttagttgattctaatttaataatgagttgaatgggtttttgtgtgcgcaggccatggacagacctccgcagccacgcccacctcaaattgtggccagccacatcatgttcttattaacgataatgccgatgagcattgaaattacagccacaaaatgctgaaagtggagggagtgcataaagtcgctattctatttcctaaggccatcatgtgaatgcgacagcatgtcgtataaatccgattaaatcgctcgtattacccatgcataaatatatacatcgagatttactatttttagaggccactacttagggactcacaagttgcgagttaagctcagcaactatgggaataaaatgacgaaagctgcaagtgaaaaccgatggccagttgaataagttgtatttagttattcctttttatttatgatcatttttagccacggtatgacaaaaacattttttatcttttgacataagcagtttttccgaattttagtcataaaataattccctttttggccagaaatttagaaataattgtctggatgtggaatgccacagatcccgttgagctcgtcatcgaattccaaatcgatttgcattcaagtttgaaattttcttttttgttgcaaaacatgcgaaaatttaccaaagaaaataatttttctaaagccgcccaaaagcaaagggggttgttagaattcgtaattagctgtgcataccttttattcagagaatttttatagaaggtattcaaatcccttcttttatatcgcttcaaaacacaaaagatttttgcccaaaaaatgagcatttgagtgaaacacctggtgttctgcaaatgcgattgtcaaggtaaaattgaccaaaatatcgcaagcaatacggcggcagtatggaatccataaagacataacctctggccttaaggtctggcatatgtgggcttgcttgtaagccaccaaacgaagtgattgcccagggagacgaaggtcagcggcggcagagggaaggcgcagacccttgtgtcgtcgtaattgaatggcgaatggactgatggtctggataccccacactctggccgtgaccttgccggctggccgaggcctatgccgtcccgttccgtcccgtccctacccgtcccctttcgtccagagaacgcacacacttttgccacccactggcgccaccacctgctgccaatttcgccgcctgctgtatgagttaatgcgcttacagggacgtcagcgtcaacgcaagtgtttggcattgcactttaagcctgtgcagccgggcaactgtcacctaatggccaccaacgagccaccaagcccaagcccaagccaaccttaccaacccaacccaagcccaagcaaaccttaccaaagcgaaaccagcgagtgaaggagattagtgcaatggcaagagcaacagcaacacgaggcgtatacgtgatgcgagggcgcataaatcaataaaacccgagcggcccagcatggagctctcttctcgagcacaatccacaccaccaccccccccccctcctccacgattttctgtcccgttttgcggcacctgagccagccaagtagcattgttaactcaatttcaacacggaagcaattgccaagcggctttaagcctttctggcttattaaatgctgccacctaagccgcaaaactgaattttgacatctcgtacgaatttgctatcatttatttaaagtttagttcgatttgctgcgattttaagctgcaactggtgccttggactgcattggtctgcattaaagagattatataaatatcaattagcgaatatgatgaagacattaatcttgtttgcatgtgtgcaatttacggctgattgatataatctcatatacagtgtgttatgcgatattttgaatgctcctatcaaagtcgagatatcaatgacataaatttcaattaactgtcatagaaactcaataggtttatgcactaaagggtgggaatgttgctgaatagatttgctaataataaggcagtgaaacataacacattaattatttaatggtctcgatttcgatttcttagcggtgaattaaaatcctgcatctcttctattacaaatcaaagtcaatttattaagacagactggtaggcaggatggatggtgcgaggcattcgaattccatttgataatagataatggcgcattgaacatgccacatgcggcacaaacgccagctttgtttgcctttgcgagttgatttcgattccattcgattcccttccattcgattcgattcgattcgatttgatttgatgtgatgtgatgtgattcactttcctgggggtctggttcggttttttgtttgctttcccggcaatgtgcttcaagctaaacaaccaacagccagcaggaacaacaaagccgaaccaacagcgatgcaattatggctggcattacgcaatggttacataagactcagggctcagggcgagggcacgctaattgatttgcaagcgagtgtagctaagggtgtagggtgcagggtgcagggggtagggcaatcggtagccggaaaagcggaaaatcgaaaatcagaagagtgctgtgctggcgggggagcgataagtagctatacatagcattaattacaagcaacacgaaatcgccatcttagccaaagattcgctatcacttgccagttacaaaagtccagctatcgatgggctaaaaatatcgctggcatttgagcgatatttatataagcattgttccatatcgaaatttgaggcaaatgtaatacacttgttggccgagctaagagattagagctaagcttgtaatgccaacacaattgagacacttctgctacgtctgctaagccatcgaatatagttatcgaaagcgcctgcaattatcgataatgatcgataacaccagcgttgcattctccgcagctcttgtaaccatgtaccaaagttctttgccgcgaaaactaaaatgaaaacgaaagtgaaaatgagcgaatggcagccgcggccacagcaatcgatccatgacacaaccagtgacaagcagtcccccagtgaaaccgcatccgcatccgagtccgataccgataaagattctgaatcggagtgagtgccgcgtccgagagcgttccctgtccacgtccaccatcggcggagcaggtgtgcctgaggcccacctggtggcatggccgccgttgccggcctctatggccttggggaggatcgccagcaccgcaagaagcagcagcaacagcagcagcaccagaaggagcagctcgagcagaaggaggagcaaaagaagatcgccgagcggaagctgcagctgcgggagcagcagctccagcgcaactccctcgatggttacgggtatgcgaaaataaaagcaaattaaacattatccttaggaacattaaattttgaaactaccctctatcgaccatttaagtgtataccattttaccttctttcttggattgaaggacatacacagttaaccaagaatatgtcatctttacacatccaactatcgaccatttatatctttaatattttaccaggttttttattaaaatcagcaaataactgaaggtggcaaataattcttcacattttttcgagaaattaaacatttttgtgcttttaaaactaagaattactttcttggctctacatcggtaacccacatacctacatatactacaactattataatatataatatatattagtaaattgttatatcagtaaatactatgtaccactttctgggtattccctttttcaaaaacaatatttcccttcaatccgatattcggagatgtgcaaatggtttgcatgccgcattggtgacggcttcatcagagttaaagctccttccatgcggatccatccaaatgcgaaataaataaataagaagcaacggaagctgtatgccacgaatatagcctgaaggattcgttttcgtttatctgaccctacagctggcacagatcttggggcacttggctgcaccacctgagccacctgcaccacccaatccacccaatccacccaaaccacctgagccactcgagaaacgcccccaaactcaaactccagcactcgaattgtttacctcgacctgggggttggcaaaaaaaaaagggagattgggggacgaactgggagccacgaggtgctggatgtgaagatgtctgtcctaaaagcgcaataaacgtgactaaagtaaactaaatcaagaacgaagcacacggcgaactttgagttgagcatttcgtgttgcacttgacagcgagaaaggagatgaaaaaagtgagaaatagaaagcaagctgaaacttaaacttgtgcgctagtgcactgtgcaaaattcgaggtttcaagttgatgatttaatatacaatagatgtacaaatatatcaattaaatattctagtttattaaaggataggttatagactcactgtgtacatttgtacaattaagattgattttttttttttatgactacagataactttcttatgatgtctacttttctgtttcgtgtgcaaatagaaaggtgaacagcatagatgtcttgctgatttctgtttgcaaagagaaagccagaggcctcagttatattcaaaatcaatataaaacactaagcaataagtaaaactgctatgccaaatattgaaattaagcccaaatgtgaaaagctaccggaatttcatgctgactaaatttaaatcaatgtctataattccaattaaagcttttttctgcaataagctaacatgaatagaaatctaatatacgtagttattcgatattacaaaatccaatttgcaagcattcgtagattttcctttaccgattctgaagcgttatttaagtggctttcctttgtatctgcatctgtgcaattgatggcaacaaaaaccaaaccattgagcagtaagcaatggaaaatgcccaaaaaataatggcaagaaaagcgaaaacacagcctggcagggaaatagaaaaataagtctgcaaaaatatataaaatacgaaaaaagtgaaagccaaaatgttattttgttcaagagttgcagggcgccaggcagtcagttcctgtcaagcaggacctctttcacctccctttccccccttccaccattcaaaataaaagtggaaaaaactagaaaaactcgtgtgagggtggtgggggaaatgtgtggaaaaactctcttgctgatttttcagtgcgcatttctttttgtttctcgcttttcggtgaagtttcttattggacttttgtgtgcttgcgcttaaactcgtattttatagaatgatatttttggctgaatgccaagaggcagttaccaagtggagcgagcggggagggcgcacaagggttaagggggctgccgctgcatgtgtgcgtgtgtgtgtgtgtgagtgtgactgtgactttgatgtcggttgtatgcctgcatgcatgtatgtgtttcagtgcactgaaagccttttggtaattacattaaacatgcccaaaatgcagcagcaatttacacatttcccttagccagccacgcccctgtaccgccgccctgtttttggataaatccaactccattttccctgtggcgcatatgtgtgagtgtgtgacgtcacatgctgcagcagttgccaaaaattgcaactgaaaactctggcggccataaaaaaggataaaaagaaagcgaaacacagagctacaaaatgctgctgatgcctttgggttaagcagcggtatatatacatacgtatatatatatatatatatacatatatgtgcatttgtatctgtgtatgtggctgttatgtctgtgtgtgtgtgtgtgctgcagcctcaaggacatttccacttgcatctgcttcaattttgttgcattagtgtcagtatctctcgctcttttcgtcctttctctcccgttttttttttgtttttttttccatccttttttttttttgtttattccgacaaggatgttaggcctttgggggcgggtatatggccaagggggcgtgtccactgcccagacacaatgtcgctgcaaacgaggaaaactgaaattaaattcatttcccccgccttgatgttcacataattgtcagttttataagtacttacaagatcgcaagcgagtgaagtggtaactaaggcaatttcaaggaccccacttgaactttattacactttttgaatcgttgttacaatgctgccaaatttatttggtcgattattgtgttgtgaacataggtttcttaaggttgttctagactaagctggttatatttgtttgttgaagtgcaaaacttggccctttttagtttcgacgttgcaatttcgacagtgtacaactaatgacgttgacaaacgctgcaagtgtcgctcgttctggccaaaagcgttgtctacagttccagatacggatgcagttgcaattccagtcgcagttgcacttgcagctgcggttgccaactgcctgtcgtcctgtcggattcgtattcgaattcgaagagccgcagacaaactgacgacaagccaagcgtcgccagttcctcctttggagcccaatgccaccagccgtatttggccggcttttcctcggcttttcccttaaattttccatccgtttcagctgctccagacgatgtcagctgccggccagtgctgcaactgcagagctgactatcaaaaaagtagctagcaaagagattttgaagagaattataaaaagtaggcatcattgcactgtcttattattttacggaaaatttatatagtgtagtatacttgaaaaatccatcgcaatctatctacttatttactgaacaactcaatgagttccgtaaacatgtacggtttgctaatcaaaatttatgaaggttatttttattgaaccaggtaaaaaaaagcgcaatacgtataccaaatgaactgctacaaacaacatttgaattatgtttttacatttttttttttatctaaaataaaatctgataatatccagagtcaagttggcaacactttccttataggcggtgttgcagcaaattaacatcatgacacacatttaaatgcagacaagatggcgagggagggagtggagtggtggagcagcaagcggcatgtggaaagtggagagattctgcagtggtacccggggacttgggaaattgaggccacacaaacgaagcaagcaggagatgtatgtctatatggccgaaatggagaccaactggcagggaagtggaagtgggctcactttcgccaaatgatgccacattgcccctttccgcatttacaattttcgccccatgtgagcagtctaattgcccaagaatggccagctcactccatgtaattcagttaccaataaactgttatttaattggctgtaaaaagcacggaaatgcatatcgataacaaatttgcctaattggtaggcagtgaatatatacatatttgcacaggcattttaatcactgaattatgtcagcataaagtgattttaaaatgcataaattgcagagaatttatcaaattgtgatactcattcactttcagtggcacataattacacctttctcattcgccctacattgctgaaagccattcaattatggatgcacaatcgataaaagcagctgaaatccctttccatttccttatttaagccttgtttttactaacttggccaagagcgaaaagtcgcttgcataatcgctggcaaatgtgggatttttgggcgccgagtgcccaaataaatatgcaattgttatgaaaaatcgaaggccaactttcaagtgtcagccatatttcacactctcttttcggtgagtgtgtgtgtgtgtgtgcgtgtgcaagaagtggagagtgagagagacacatgccggaagtggcaagcaatttgggcggcaaaaagatacagtacacgcagcaaaaatactccataatcaaagtaatcaaataatgcctgattcaattcagttttcaaattaactaattgaatatgaaatatgaatatgaaaagtgcatttaattttaataaattcaaattagtttaaataaaccactcaaaataaataagtaaataactcccaacatttctattctcaacttcaaagtggacggtattatttttgttaaattttgctcagtgtaaacttcagctcatcagcagcatcacacacacatagaaaccagaagatggccaactggtcgctacttatggcgccaagatgacgcccccttttccgtcttcacctcaacgtcctcctccatgtccatgtcctttttgcccatccttgcaacttgcaactcgctcaaaggatgcgctataaattttgcaggttgttttgctgcgctgcacaagtttcggcggtataaaactcagccccgtcatttaccaacgattttcccgcatttttccacccatcgatggctacggcatttgtctcccgttttttttcgcatttttttgttccttgttgcggccctttgctcgaaaatatgtatattttccacgctcatcacccccgtggtcgcatattttatgcagctgcctcgggttttcctcggatcctgcgagtccgcctttgggccaggacgaaaaggacgaccggaaaaagcaggacgagctcaagccggaatgtcggccagagctgcgggccacattttccacgctcgcttctcatccattgacgtttgaggttgcattgttgctgaattgtcctcgacgaggtcctgtgtcccgtgtaattgaaccaatcgcctctcgccgcgctggaatatgaaattccagcggcgcggcagccctttcatccataagatattttttagcttttttcgctctccactctccaactcgcatctgcctggcatctcataaatctcattaaaaatgcgggtggcaaaaatgatgccatagtgctcagagtggctactattcaaggggatcttaaaaaatgtattatcatttttaccgttgccaaaggaatcacaaactctaatttccgtaatttatgcaagaaaataccctttctgttcgttcagtaccctatctctatatataaaattacagcttacagtaagaatacaatagctcttcctcattgcaaaattatcaattgtaatatgttgtttaaatggcattttaattggtaaccaaccaaataaattggcttagcctgccgaatttgttttagcttgttaagctagtttattgtttgttattaaatgttctatatgtgtgtattgaaaccatgcgaagctcggcatgcatgcgcattaagtaattctcatacaaaatagattagtttggaactctaaaattcaccattaggtcccctaatttgcggcaaatcccagttagaataactggtcgcctggctaccgcagatatatcctggtcgacgcctttattgttatcctcgttttgcattccatggccccatggcctgccccctcggaaaatatgcattttccgcgtttttccgacccaaccgaccgacccctcgctggtaataaatttggctagcagcttaacaagggagctcaacagcaatgaacaaaaacaaaaaataaaaaaaaaattaaaaaaaactggataaaagtatagaagaggccaggaaaaaatgcagcaccacgggactgggaaaatccgcgcaaaacgaaggggaaaacccagcaggccgttgggctacaatgtataacatggcactaaaaattttatggctcccacagcctttgacttcagcttcggctttttggttttagctttcgatttggatttttgaaatcggttaagtgcaggcaggactaaaccaggacattatcccattatgggaatggccagttttctatgggaattcggtgtcatatacgcagcaacgcatttgcgtcacttcgggccactttgttattgtttcgtttggaggccaacatagttgccaaatatacgaaaaaataagtcccagaactggctaattgatgtaatacgaattttccgcagtcacaatttcagcgttggatttattataccgactctatatatacacacgtgtatatatgtacatatatcctgtggccggcatttcagcactctctaatcgatcgaaagcgacggctacaaaatgcacaaattcataatgaatattttagcttgattaattgccagtcgaacaatgcagatccaacctcgagtttgaaacgcactactgccaaatggaatctggttggccaaaataattttgattatgacttatcgaagcatttgatgtactgcttagggccacaaaaattggcagcactttgagagtcctgcagttttactaaagaaattaaggaataagtgtatgttaggttttggtaaataattgggtaatactgttattactatcaaatactatagacttatgtacttcttggaaatgcttcaattgcaaatgtgatattctccatctgacatcggcaatatatcttaataaatattacattacgtacacccacgttgacatgcaactacaactcaattatttttcgcttaaactgccaattattttgtcgctccttgaaaaagtggcgagtttcgcaataaataattaataacacacgaacgtatgtaaaatgcttatgattgcctggaaacttcggaattcttcactggaataaatttatacatctttatgcttcaatcgcaattcaatttctcttaaatctaatttacgaagcacgtgaaatgtttttttttatgtagttctattttaaaatcaaaaatcacccacaaacattgcgtaaaaatgtattttttcaattttaaaataatatacttttcatatggcaatttcattcaattatcccatgaagttctcgctacttgcaaagtatttttttatgcattcatattttttatacatatatacatatatattgcgttagtgctcaatagccaatggacctgactaattgattttgtacacgaaatatgaattcaatttacgttgtttatcattcctggtggcccgagtcgcatgtgccggattaatcccattaggtggccgctcgaagggcattgtgggtgggaattcggaattcagccttgttgctctctgtcaaggatacgcggacgtcatgcccgcccactgacgtcacacgagggcggtgaactgcggcgattgcaatcgatgcggatgacatgacccaacgacccaataacccaccaacccgccgagtcaccaaaccagcttttccgattcattcacctgcttataggatcttctcgtttcaagcgcgcgcccagcatccgcagtaggagcttttggtggcgccctctgtgcgctgagctttcgactggaaagcggaaaggccgcagacgcacagcttccggcttccaggcgaaaagctcaatccgttgacagctggccaactgacagttgaccgtgttccgtttccgctgcattccgccagcaattaatgcgaacatcaaaaagtaataataataaacgtaacttatataaaaaaaataaccgattttgaaaacggatgtagttttccacaagctggcctgtttgaatttttaattggaaaaatcatagttctatcaatttgataaaacaaaaatatttataaaaacattttctacagtcttaactgattgcgttctatacttttcactgaaacgacaaataacacatagtaatatcacatagtcttttgagtaaacaatattctagtaaaagtgattcttaaaatttcagaaataacccaatatatttgatagatttaatttttttatttaatggtattaaatcctatatgctcctatgtaaatcaacaggtgcaaaaagatggaataattacatgtaagccgcaaatattcgtgtaataaaaaaaaaacgctagagataccattttgtgtaattggtactctataacctataaatattgtatataaaaataacataataaattatttgtcatataaattcttaaccataaagatatgtttgacaaatgacccaaaaaaaatccacaaattaaattcatagctaaagggaaacaaacacaaaaatttaactaatttttttaagcgaaatattttaaatttgaaagttgaaatgacaaagcaaagctaaacgaaccgcgattttgacatctgtcagcgggtgtaccgcctagtccttttgctcgtgagctttattcattgaggaatctggcgaagctcaagctcgctccgcggcagtattcccagcctggaagcccagctgacagcttccagcttccagcggaggagcagctgtcccatcggtgggcgcaaacggaggagtgttgggcggatggttgggtggttgggtggttgggcggttgggaggacccccggtcagaagaacacccgagaacgaaacgaggaacaccggccaacggaacgggggaatgagcggaccgagtggaacgccgagtggctggcccagtacactctgccgagagtcagtctttggcagtcagcagccgacaacagatgccgacgaggatgcagaataaccgatatctgaatgcgaatgcgaatccgaatcgaaatcgaaaccataaccgaatcccgaactgaaatcgaaactgaaactgaaactgggagaagtgcgcggaagtgtgtgtgttccattgccgattcgtggcgttccagtggcagtgcatcaacaagggggcgggcgccgcgaaagggggcggggcaggacacaaatccaaagacgaactagaaacggccgcgggcaacaaaaataaattagaaacaagagagccgagaaaaagccagaaagcactcacaaccagccaaagaaaacgtgttaaaatctagttaaaaaaaaaatatatataagcatttttttacactttttttttaagacaacaaatttttttctactgtgcgtgtgtaaaagacgaatcacaagaatgatggaaaaaagtgcggcaaatggagagattaaaaccgagcgataaagatacacaaatccatgggattgcgtgcgtgtgcttaaccttgacatatcaaacaaaacaacaaaattagaccagagtgtaaaataaaatttaaaagtatcaatctattgtgtctgcagtgcggattctgcgatttttggcatcgctgaaattccgctgacatgccattcaactcaacagtaaatcgaacaagcgcaagaacacacaattttagctagcaaaaataaccaacaaatatataaataaatatatataaatcaaattcaagaaaaaaaaaaactgcaaataaaaccaataaacacttaagaaatttcattaaacaagtggccgccaaagagaaagtagtgcaagaagaaaggtgaaaggcggtgggtggggtagtgtgttcaaataacatattgctaagcagaaaaagaatcacagagagcaggaccaaaggagagagagagagagggggagagaatgaaagagggaaagagagggctcaattgttgttgttgtttgtacagcagcctacctgaacagcagcaacaacaacagcgagcatcagcagcaattccgctgtaagcaatatttttgaggtatatccttcttaaggacgttccaaaggcaatttgctgctgctgctgcagtgtgtgtgtgtgtgtgtgtgtgtgtgtgtgcttgtccctctgcttttgccccaacatttctctcttttcgctttgtcttcatcttcacgtaaacacacacacatactcacacagagaaatgcccaaagaaaatgaggcagaaaggagaaaatcaggcgtatacgtaaatatccttaaagcattggcatttgtatttttcgccatttgcttatgttgctagaatatgtggtatttcaacactaaattcattgataaacggctcaaataagaacctcaaaacattaaatacaacactaacttgatattttattagtatgttaaagattcactctatggtaaagattaatttcatgcaaatatttgcattttatgcaaaaaaaattccattccgtcttacgttcgtagaagcttaaactgtgcataaaactaatatttactctcgctgttcgcataactcatacgccgtggtgctttcaacttgaaatgagatttttcatttaaagaagtagggaacagctatccaatcatcaattcccctaagaattgaatgtaatctacggcacggcttcaagaagttcatttagagcatcgattgaattcttcaaactgtccacgtggcgtatgcgttatatttgcaaaattcaatagggacaacagtgcggatgagtttttttcttttttttttgctggccatcaagctgtaaaaatcgcacgctaaccacaaatctgccccagattgagtccttaattcatcctttatccatgcggcctctcacctggctgcaatttgacgaaacttttggcaagtgctcaatttcgtggcacacacagatgttggatgctaaatgctctgcatgccgccgatgttgacctttcgaggctgccaaaacgctcacacagacagtcgaaattgatggatgagccagatgctgggtccctcaattctgattttgcttttggtttacaccgagattggcaacgtgtgaacttcaaactgttgccaaaaacccacacagcagacgaaaatacacggatagctaatcaaaattgattaaaacccatcgatggcagtgagttttgtgcagtgaataccggggaaatagaaaattgaaaatggggaatgtgataaaagccgatgtgaggtgtcaacacaatgcagttagacccatcaatcaattagcatcggcagttggcagctgaacaatatagcacttaaatacctaacttaggcctaaaacgagatcgatattttaaattcaaaccaaaaaacccaatttatttgtggaggtctatggtcagcaatggacgagtcgtatgtattttatttcaatttttatttattatgactagttttgttctgttttccttctttcttgtttattgtattttataattttctgtttaatttctttggcccagatgcaaaaacaaacttggtacttgctaaagccatgttattaacctctttaatgtttattcatttatgttcttttgttatgttttggtttattttaaatttaaaataacttaattttttaataatacatatttaatacttagtttaaattatttatttattattatatatttgtcttaggcatttgtttatgtatcttaacaaggttttaatgcaggtttggatagtatgggtgaaatatgtgtgctactaggtctgaaagttcaattatcgagggtattggtgcttctgcaacttcttccataatgtctttggtcctcaaaagttcagttttgttttgccaactagggaaaagtaaagtaaagtgaagtgaagtgaagttaactggagttgagttgagttcagttgagttccacaaaatgcgtgacaagacaaaggcaacaacagaggcgtgagttgatgtctctttctgaccagctctccctctcattctcttgctctcgtcccctctctctctctcttgctctacctttctttacggttttttttttttttttttttttttttgtgggggggaggttaagtatttactgcgcacaccgaaaaaatagaaaagccaaaggaaacgaaattcgtgagagatgcgaagagatgaaagagggcaggcaatggggacccggttcactttttcccggcctagcaaaattcccggccccaaaggaccctcgcacacacacatatatatctatgtatatatatatatatatatggcaaacacgcagacgcaatagcaaaaaacaaaaaaaacggacagctgcttaacacttctgaaagagggagtgagagagggagataggtgtagcggaggtgtctgataataacggcaaagataatggaaaaccgcacaatacgctaggctgcgaagccagcgaagcagcgggcaaagcaggaaacgccaataaacgatacaacacagcggacaaacggcaaacgcagccaggacacgcactctctttctcgctcgctctcttgatttgtgcgtgtgtatgggttgcataaatccgccaacaagtttcccattgtgcagggccttagaatttcccttttttgcctcaacatccttcgcgctctcactctctttccctccacctagcccttgccctctctctctctctctccttacaatgactcacgaggcttgctctcgtattagtgttattttgttatacacacacgccacacgtgcgtgtgtgtgcgcgcaggagagcgtaagtgtgtgtgtgtgtgtttgtgtgtgtatgtgtgtgcgtcggtgtcattacatcgccagttaagcgcttacacgcttcaatttctcgcttgccacttatggcccaacattcgtcgcctttcgtccttttcgcctcgctgtccgtttcggtgcgtgccactgccgccgttccacgcgttccactgccagctgttccgcatcgctccaccgttccattcccaacttgtgccgggccacgttttttgcgcgctcttccagttgtttgttctgctggtcctcgaactggaaaccaagcgaaaggcgaaaggcaaagagcgactagcgggataaacccgctccctttccctcatttgcttaaaaaaaaaaaatgatgaaaagaaggcctagggcaaatcaaagattaaatcttctttacttgattctaaaaatatcataaattcatatacatatgtgcgtagcccggtgcaaaagttgtttttctgttgtgtgtgtgtgtgtgaagtaatctaaaataaaacacctccgaaaataagttaaggcgtgggccatttacattcgaggctacatatgtgtgtgtgcgtgcatgtacgtatgtatgtgtgcatgtctcgacttcacctgtgttacctcccccatcaattctgctgcccaatttctctctgccgaaccgaaaggttcaaggttgttgttcccaatcgaaaagtcgcgccaaaaacaacaaacagcagattgctctccattcgcaatcaattgcaattattccaaacaaaaaagggatcaaagagaaagaggttgggtactgtagtattgggctgaatgaaaacgctttaaacgccgcccataaataaattgtgaaaaatctgggctcaaaaaaaatcaataggtaaaggacatcttgcaggctatccgctgccagcctatttttacccaataaattgaaaacaacctaaaacttatatgagtgctttctaaaaacggaaattgctattttcacttgctgtttccggttcaaatgaaacgatttcggtgcatgtatatgtgtgtgtgtgtgtgcgtcgtccatgtgcgttccatccttttttttatattgctggaaaaaaaaagctaacataaataaataaatatcaaactgcagctaaaaatatgtgtgacaaataaccccgaaagcaatgtcaacaacaaagtggaaagtgcattgcctaattgccaaagaaaaaacaattctaaaagccaagcaaaacacgcaactctaatacaaatacatatatattgaacaacaaaatcccagactcgtcttcaactagcccgaattgaaagaaagaaacccaaaggacttccgagcaattgccaaatgctagccgaaataggagccaaagcaatcttaatggccagaagcagctgcacgaaggtgccgaaagccaaggagctcgccaaataacagaaggtgctccggactagaagcatcagaagcagcagcaccagcagcagcaccccaaccaccgccagcatcgcaagtggattaccgtaaagtggagcagccgcaggacgaggtcgagggcgcggccaggatacgccatccgagcaggctgagcattggcgcaattagcgattcgcaccacttgctcgtcctcaaccatttcccgcatcgatttcatcgagcgatggggcctcacaccggtcctgcgaccgcgccaggagcagccgttgagcggtgaaaacctatccaacgcctcgccccctcttctctgcgataggtaaggtccttgaacgatctgcttacccagataccatagccattatcttgagcaagcaattggggaactgagaaacactgcctttttcgcttgtactttaggcctatgaatatggaggagaacattgctatggtcactggcttctttaaagatatccctataaactaattcttacatttcctggagaaacttgaatagcttaaacgtattcacaatcttcaagaagataaactttattcatctttacgataaattgagcttattgtttaagaaagtctttgcagaaatattccaaaaccatctaaaaaaaccatacattttcttagatgattttatcctttttttcaataaagaatcttgcattttataaataaagaaatgtagtaagacaataatatctaaggaaaccataaaaataaaaacaagaaatgctagttaccctgcgatattcaaatgtagaagagacgcaatatgtcaaccgctggtcacgaaattcattgcatacctcagggcgtgcatcccttcgctatgatgatgaatgacaaatgatgaagcgccagccgcagtggagtgaatgtaaatgtgaatgcagatgcacaaatagacagaaacacagacacccacatacggacataacacccactcacactacggtgcgaaatggtgggcgggtcaatgcggcgtatgcgcaatgtgacattgacagctgcccaaacggcaaacacaaaagtggcacagcatcaatatcattaacattccaatggccccagaccggagccctcaccgcacacactcaccatcattcattcactcagtcattcattcattcccccgttgccttttcagccgattgagacataacaatatcctttgatgatatcctgtaatcgtctcagtgaattgacatgagtttgacatcgataacgatgtgctgtgtcctcgtggctacccttcgcctttgccccgacgcttctttggttttcctttgtgtggagaaagcattttcgccaagcagaagttcaagaacaaatgaagagcgaatccaatgcatctgggtaaattggtaaattgatgcccgacgctggcaaaagcaattcaaggcactaaaatcgctgacaccaagtactttcttgtttgctgcagatagagaaagcaaattatataacctatagagaataaatcaataaatatatgttttataaatatatatatgttttataatatatgttttatatgttcgaagggctaatctatgcatattggtatctcagcagcatatggcaccattaagcgccactttaggcaaaatctcaagctttccatcttgagatatagaaaatattttggccagtgtccttacacatcagtctgctccttgctgctcttgttgttgctgattgacgaggcttacactttcactttgccttttacccaagcaaacaattgccgcacatttcaacttgcaacttgacttttgcccgctcctggctgcctgccgcttgctatttgctgtcattgttcttgacttttgatccccagtgttgttgttgttgctgctactgctgctgttgctgctttttttgctggcaatagtgttggtagtagtggttgtagttgtagttgttgctgccagcgacaaggcgacaagcgccgtcaacgtcagcagcaaacagcgaacaacaaagcaacaaagccaccgaacaatggacaccgaacacagccaacaatgagggaggtgtgtgtgtgtgtgagtgtgggtgtgggtgtggtataaagacctagcccccctccctctctacaccatcttcccaatccctagaaacacacacccatgaatgtctcgccattttcgctttatgtcgctttcactcgcttgattttcgcaacgaaaaaccgaaaaaaccccatctcagtttcagattgtgcggtgcattaaaattaaaaccacacaatgcggcggattggtgaggggtttgatatgtattaaacgatttcggggtcttaacaaattgaatggggattacttctgattgtggccaagacaattggaagctatctcaaactgcagcttgtgggtcaactactcctctttcattctatgaaaccttttgacccttgggtattttacagatttgatgaattaacagaaacttgcaacattttactcacttggaaatatagccctttttacaactttttacaacccaaaggggctaaaagaattaaattataaggatttcatggtagccattcatgtactttctaattaaaaacagatatatatatgtatcacttcttattacccaccgttgtatctttctccaacttaatttacttaagggatttaccaaaatcagttggtttttctagtagcatttaatttgcagtccaactaacaagttaatcagaagggcaaacaaatattatcttgtataatcaataaatatcatattaggtggacaatagattatctaattttaattaatttctatttatagtgcctctaattcaaattgttggtatttgcaagctcttaacaagactagacatttaattgagttcgagtttcattatggcccaacttgaccaacatcctagactttaattgatctgcctaattacgcttcttgaaatttacgttttaaaggagacttttcaccattagaaaaccatgaaatatcgattaatgaatattccaccgagccctttgattgtcttatgcccactgaaggaccatgaactgattgcacttctgagaggctcggttgagggtcctcgatctcctgctatctctccgtagtcaagtgtccattctgtaggtcctgtgccacccgcttttcaaccgcttttccacccgcttttcacctctttgacacccctgacaaccaccccctcccccctgtgcgaccactccgctaactcctgcgcctttgacgcacttgagacatttgaaaagtttcaccttttggagaagttcgcttcgcttttaaattgcgcgcttaacaagttcgtttcctgtcctttttttttatcctggcccccatttcgctgtaactccacactgcccgttccattgttactttcctttaagcttagcctgcctttttcgaataataaacgacgaaaagtttcaaatagcggaacatgtttaaaatgcctgacgtgcacacttttccagcattttttgcctcgcctcgccacgaccctttctccgtaattttcccccaacgccttctccattttcaactcacagcccctttcattcattcttttctggccacacgtgcattggtaaatgcaaacagcaccgaaaacagaaaacagaaggcgacaggcaacaagcattcgccaactcctcctgccactcccactctgccgcccactttcaccccactttctccacccacttgggttgttgttggtagctgtggaacggcttgcatgtcggtgcacacgagtagaacctgagaatggttgccaaaaataaaaaaatccaaacggaaacggaaaatgagaatggaaatgaaaaacgagaaagcaaagtgttaaagtgatatgtttaaaacttctatataccctcgatcttgaaattacattgttaccaatggctttttctataataataccttgcaaagcttttaataaaaacaggcaaaatgcctacgcattctgttttgaatttttatataattttaagcataacatattaagcatcacatatcatctaaaatcttccaatttccttgacatattataccctatgtgctgaaaacaaggtaaatcacgaataacataccaacaacccacacaaattgtgcacgcaactgtccaaggtcacaaaagggcaggccagttggtagtcgctagttggttagtccgtccgtccctccgcccctccgcccctccgtccgtccgactatccaacagccgtccagctatccgtccgtgaatctttcagctagggatttgcataattcaacgctgcgggggccgtgattcccgatcccccgtctggcgattgatggccccggatccagatccggctgcaaataaaagtccgggtgcaaatccggacggcaggtgtatttccaaggcaaattggtgaaatgcaatgcagttctggaaaaaaaagaacaggggaagtgtttacacagcgcacaacgatttcaaggaaatgaaattgatgaatatagtggaaaaatatgcatcacataaaaagtttcaggtgcttctttatgtcagttatttaaaggaaatgcaattgctcacacaaaaagatatatctgcatcatataaaataattcgaaaattatatgttatgagagctaagttatattgattgaagatttttaacttattccacgactttaattctacttattaaacttctgtataagatgcgttggccaatcttgattaagatcttttctccacgtgcatattcatttattcatattcaggttcaaaactttgtcagtcgaatgccgtttgtgacgtcagcatcgaatcgagtttcgcattcgcattcaccttgcacagcctgcggcgcctctcgtttgacggcgttgattgaatcatgttgacacgctcccctcgtccgatccccaaccccctccctccgtacgaccatgtgttctcccccagtggggggggggcggtgtcaaatcagctttatcaatgctatttcccataggggaatcgattcggccgtgggccgcacacaaagtcgcgccaggacaaaggagtttttaaagcaaaacatgaggtccttaataatgaagatatgttggcgagcatttcattatcaaaaataataaaaatgattatcaagtgtttacgccatcttaaaacagtgctttctaattggatataggtcgcctggcacttctttaagaaaagcgcccttctcggcgattctcaactaccacagctaagtgggtacaaattgatgatggaaatacgtttttatttgattattttataattgatttcacttattttaacttctttattgatatatttatgttactgtagttattcacccttcttggcaattcttaatggtcttgcttaagtgatggaaagtatgtgataagccattttccttattttcaaagcagatgattgccaaacgtaatatattcagctcatttaatttccctattagaggcacggctctcctcggcgctgcttaagtggcgaaagtaatccgcagatgcggtcccaatgcttgattaacttgcagatgcgcagctggaatgtgcggcatgcataagcaaatcctcaatgaggaccgactgggtaactgggtgcaagtgcactcccccagttcaaggctccttcggtgtgtgtgtgtgtgtgtgtgtgtgtgtaggtatgtatgtgtgcatgtgcatgtgcgtgtgcatgccttaaatttcctttcgccatcgcattaattcataaatttcagcatgccgttgttgacgcttctaaaaatagtccacaaaaatggagaactggaggttgggtctcggctgtcggctgttggttgtcggttgtcggttctgggggtctcggggtctcggggtcttggaaggtctaaggactgaggctgacgttgccttgaccggacaaagagaaactggcaccaacacacagaaccacacactttgcacatgccagataccaggatactcacacatatgtacataccagtgggcgaaaaagggggggccacgatccccaggacgaaattgcacttcgattttgcgactttgcattgaacttcacctagcgccgttttcgtttccgtttcagtagtagtaacagttgcatttgcagcttttcgacttatgcaatccacctgcagaacgatgcggaagtgggtgagactcgacttcaatcgactcgactctactcgaatcaactcgactcacgtagcgacttgtggatacatatgtatgtatcttgtaaataggtcgctgcagcagagcaccgactcatcgacaacggcggcatctagaaaagaggcgacaatgacgtcacagccgcatcaggctgtgccgctgacctatatacacgccatcaagtgcaacagagacggagacaaacagagagtggaagagggagacagagacggagggtaaacgtatgcataaatttcccaccgacatttgcatatagtagataaacaagaaatttgcttccatgtactgcactatacatgggtagagagattgtttaaatggcagaaagtcggcttagaacagaagaccagctagctcacctgggcctaaattgtttgttgacatttcgtttgaaccggtcttttccaccgtgcactctctttttttttttgcggcctgcaacagctgctgacgtcacaccggacaatatgccaatttgcggttaaaataagggtacataagctgtgtatcattacgaaattatagaccacgttaatcgaatgccaacgcctacgatgttaactatttatacgccagttaagggggtattgtgccacttaaaagaatagaatatagaaattcaataactgcatgtcgtaaagtcaaaatattaaatgaagcccttctctgcgcttctcattcaccgcagttaattgggttacatgaagaaatggaagttgaaagtaggtgttgacctggttgttattctaaagattattgaataataagtcatgaaaataaagtagggccctcctctgcgcttctcaatcgctacacttaagagtctgaatttccattatatactattaagtgtagatcctatttaaaggaaatgtatttatttaaacacaattagtaatgccatgaaggctatttcgaccgctgccattctaaatagccccactaaattggtgtaaatgcctcaaattacaaataggtgttgatctgatttccgggcacacaaattactttattttatcatgaacaaatatgccatgaaggagaatttataataccattattttgttgaccacatgtgtgaccataaatatgaataaccagccgctgtgccaagatggagttgcaaccggaaaagatttatgccgacaaacaatttgttcgggcaggcgctcgccattatttcagtcgagtggaggggataactgatgtgggtggtggataacgatggagatgaggacaaggctttcgggctttgggttattgagggtgggccagtgcacttacacgcttaattaaatgccacggcacggcgccagaaagcaggcaacggcaacctgccatgcaacgccaaaaacttgccagcagcaacaattgcagctgcaacagcagcaacaattgcacattgtcagcaacatcagcgataagggcggaaaatgttgggcattctgccagcaaatgggtggttcggtgggtgtaagtggttcgatgatgatgacgacgacgatgatgatgatgatggtgttcctgtggttaggaccactcgctgggtcgtttttatatgcgattgtaatacaatttcaattacaagtgtaaacataagtatattgccggcgtgggcgtgttgtgttcccagtacgcgcatacaactatacaagtgtatatctatataaacttcgagtgcaatgaatttaatttgaacaaggcctaagccaaaaggaaaggacggtatacgagtatcttctgggtctactacccacccactcgttatcgtatccacaaaatgggttgccaacgaaattgcgaattgcaatttgatatcgagaaagtgagtctgaaaatccccgtctgccgccggccatgcaatatgcatggccattgaatattcaatggcatagcatctggaaattgattcgagccgataagtaattaaagaccaggccactggagagcttaaagatcgaaggcattgaaaaatggagtcgccgcgactttcagttaaaaagaaagtcaaatgtaaataaaatggctgtgggctaggcaatggcaaagtaattactcttggccttattttaggtaatcaaaaatgtggagggccttcctccgcgcttctcaaactccacacttaagggatttatattgcattaggttaattggtgtctaattaaatttggactttatctacgcaactcatatgtcgcactaaagatgatatgttcgtcatccttcaaataatagaggtacctttaatcccttcaaaggtaaatgttttgaatattacttgtaaataatcatagtagtaaaaatagtaaaaatagtcttgcacacctcgctttaaatcctatgctttaattacgcctactttattcttaattcgcaggtctttgcccaaattgagcagtcaagacgaagaagggggggctggtcatggctttggtggcggaccgcaacactttgaacccattcctcacgatcatgatttctgcgaaagagtcgttataaatgtgagtaacccaagcgagtattagatactcataacctaacccacttctaacgctactttgatccaggtaagcggattaaggtttgagacacaactacgtacgttaaatcaattcccggacacgctgcttggggatccagctcggagattacggtactttgacccgcttagaaatgaatatttttttgaccgtagtcgaccgagcttcgatgcgattttatactattatcagagtggtaagcattggaagtggtgccaaatagtacccccctgcccgaaaatctaatgcaacttttgtgcaacccatggctaatgtttatctatttctctctctataaaccctcgtcgtcgccgaacaacaaacaatgaatactttactttattcatacaccgccaccaactcaccataccacaaacaaatacaaatacacccatcacgttcatccacaggtggccgactacggagaccggtcaatgtccctttagacgtatttagtgaagaaataaaattttatgaattaggtgatcaagcaattaataaattcaggtaagcccacgtgttgcccactagaaattccaccattcccctaccaataaaaccaaaacaaatactaaaacaaaatcccaaccaaaaataaactaacaaaatatgaacaaaaaaactaaagcaaatcaaatataaacaggacaacaatttggttcggtttatttctatattggtagcacggcaaattttttatcgaatcagcgtaatgaggcatgcaacacggcaaacagaccgacacacgcacatttaacatagacaatagaatagaattagacttggcttaaatacaaacataccaatatatgcatacatacatatgtacacatacaaattgcgttggctggaagtgcggttcaaaaagggaaagcctttgtacaatgcaataataaattgtcaataaatcgaagtattctaatcgaatagctttggcttaggactcataaaatagtataattatatgacgatacatgcaataataaaattaagtataatttattaagtagcttgttggccgctttccctgagaacttaagcatctccaccgatggcaagctggaagcaaattgtataaagcaaaaaagacccagatctagatggactgaactctggaccgagctcgattgcgaaagtgaatgttaatcccttgaccaccagcctaaaattttgttgatacggcacgggggggcagtgtggccggacccgtgatgcggaaatggaaaacggaatgtcaagcgaggataggacgaacaaggatccagcaggaagaagccaacttaatctatttcaattctttgcttattgccaatgccataaatgagtcaacgcttctattacggctttatttcttaatttttactcaagcttagcttgcgatttaagcattttgcctgcttccgattagatttgcgaaccaataaacaaaatctgtgcctaaaatataacaaaaatactcaacgaacgtcacactcaaacacacaccctaaccacactctcacatcatcaatagtacggttaaatggctcgtttggtactaacaataaaacgtaaatatattttctacttgcagagaggatgaaggctttattaaagaggaagaaagaccattaccggataatgagaaacagagaaaagtctggctgctcttcgagtatccagaaagttcgcaagccgccagagttgtagccataattagtgtatttgttatattgctatcaattgttatattttgtctagaaacattacccgaatttaagcattacaaggtgcgtacgaatcaagcgaaacctcaggacctccaagggatacaaatccatattttcctttccttttctttttcctgtgtttctgtgtggcatactttcaggtgttcaatacaacaacaaatggcacaaaaatcgaggaagacgaggtgcctgacatcacagatcctttcttccttatagaaacgttatgtattatttggtttacatttgaactaactgtcaggtaggcagctctcttccatgaaaagtctatttatgcatacacctagttataagctaagcgaacgaaagagaaatattagtttgaacttgaactcgaatacaatatctctctatccatcctcgttgaaaaaaagctatgtttccaattaagtacaaatattgattgattttcggttatctcctgttctgtctataatttgtttatattttaaatacgaatattatacttgtatttctctatctgttgctttgcttttgtttgacactcatggtttaattcaactgtttcaatctgaaatcttctctctctcttacaaatctccctctctctttctctctcttgctctcggtttctctatcgcgctgtctgtgtgaatctttaaaccaaaccaatcgctggtcgttgtatcgattttgtgtgtgttcaggttcctcgcatgtccgaacaaattaaatttctgcagggatgtcatgaatgttatcgacataatcgccatcattccgtactttataacactagcgactgtcgttgccgaagaggaggatacgttaaatcttccaaaagcgccagtcagtccacaggtatgagatttctgtttgcccaatgccaactacaccaaaaatatcaatattaatcacccacacacgaccacacacacacacatgcatatacagttgaaccgattaaagtaataaatgttgccatcatcatttatgagttgcctgacatgataaagaaggggttgcctgcccgccccgaaaccaaaaaaaaaaaaagaaagaaatacacccacaaacacaactttcagtcaaaccttttcatttgttgcaatgctcaattcattaacaaccaaccaacttatcccaaactactagtttatcgataaaaaatgttcattgttgtatattaccgatactaacacaatccaacatccgcttactcacctctaaatacaaacatacgatcgatctatgtaaatgaacatccatcatatatataaatatctaaaagatagacacccagtacataccaacacacatatatatatgcataccacctattatatatatatatatatatatttcgataaaatttttaggacaagtcatcgaatcaggctatgtccttggcaatattacgagtgatacgattagttcgagtatttcgaatatttaagttatctaggcattcgaagggtttacaaatattaggacgaactctgaaagcctcaatgcgggaattaggtttacttatatttttcttatttataggtaagttccatacagtcaacaaaaaaaaaaaaaacaacataccacatttacttatcgatttacgagttttattcaaacaacatcaaaaacaaaagagaaatactgcaaaacgactgcgaccatccagacagacttaccctcgctaccctgccccctcaaaagatattttttcaactacttctcactgccccaaagtcctgatacatatacttacagtaaatagatctaaaactacatataactacagcggaatcgtccaacgatcgcgaattaaaacaaccacaaaagatacatatatataactatctacgcttacgtctgcctcaagccagcacatttatgttaccgctcatcataaacgtccaatcctaaagcccaaaaaacaaaaaaaaaatgcgaaaaatatttcattgcgccacagacaacaacagccaaacaagccacaaatatacaaaacaacagatacagaaaagtgttatgctttttatgaacttatcattttcaatttgatttgcctcacgaaactcggcgaaagccaaaaaatgccagacctaagactaagttataccgaaaatacgagagcccccagtacttgcttatatcaagtatatacatatctagatatagtgtatatgcagacacaccttgccccgccgcccaaacaaactatacgaaacatccattatgaataaccgaaacgatagagattagacataaaacaaacaagctaatctaaagtaaactaaagtaacgtaaactagtcatactacctatatagtcacacacacatacccaaaactctcacacacacgctaaataaataaataaataacatagtgggaggcccttagaacgtgtatccgtattacctaggtgtataacttgtataactcacccattacgtatatctaacttatctagtgtcgtctaatcctagcgctaagtaggtacgaactatcgaccaatggagcagcgatacgttagcgacccgatcgaccggatcttatatcccgatcttaagatctatacccagatctgctaacaaaagctccctaagtatcgttcactttggatacgttcgttgagttctcttcatttgcgttttgtattacaaatatcaatttaaatttgagttcggttttggctagctttttggataaacagcagcaaagtctctcaatgtactcgaattttagtctattactcctgatatactttgacaaagtgcgaacggcagaccagggaggcgaaattgatcgaatctttttagcatcgaatcgtttcgggattctccacagtgccgcgttcaagtcgttggcaattttaaggacctcaagcattttgtgcgcagatctaacttatgtactttctcaagtcttctttcttctttatgtgacttaatagctaaactttctatcttacctgattgacacctgaaatcccttccatgtcttctgattccccactttgtttgtatgtgcccaaactgcgttgaaaatgccttaaaattggcaaacttcttggcattgaaattgtccaaccaaacgaaataaatagcaactagaaatggtgatcgatatatgttacaaccttatacatacagaaagatcaagcgaaatttaaaaccatctgtatgaagtgaattttatatattttgtattgttgttcatgttctatcgcattcaagttgttcgtaaaccgtattcagtaaccgtaatcgtaaacgttatccgtattcaataatccgtaaaccgttttcagtaatccgtaaaccgtactcatcattaacgttgtcgtttcgatgtccatgtccacagattgtgccgtggtttgaattttgcttttagttctatagtttctagcttctagttcctaatttctagttggtaatttctagcttatagtttgttgttgtatctgttgaccaattaacgtattaactaatcataagtataccatatgtataatctatagtgtaccatatttaaaccgacatgaacatgagacacatctatatcaatatatcgttaactaaatattctcaactatctgcatatctaaataaatatatattctgtatatatcagttacgttgagttctgtgtctgtcacgtttcgttacgttatgttatgttatgttatgatagatacgttttctttggcttttcaaaaatttcagactactcagtgcagatgttgatcactaaatacgatatttaactgatatatacgtgtatagtatatcgatatttctaatagacattcgatggttgctttccacttgtttccgtttccgataccgtattatttgtcttgccgtagtgtagccttatcatatttagctatacgcatatacatatacatcgatatattgatatatatgtattgaattgatatgactacttacctactactgctacttatgaaccgtaacgtatgtatattgtattgtacagagtacttagctagtttcatgattaactctaatcaaaccaaaaatcaacgaagtaataatattctctataaataaataaccttctgtatagctagtttccaccgatcaagtagtcgtactaacttaactaatacacacactctcacacacacacacacacactctctctctgactctctctctctctctctctttctttctctcacacacccacacttgtgaaagcgcagagatgtaggcaacgattcctggtctctgcacttcgtgtacttcggctttagccgaggaacatgccaattttttggttaccgcctttgtaatattttgctaactttcgtgtgacacccacacaagcaaacacacccacatagacacttctaactactaatacatacatgtctaaaacatttttaattacatacttatatatatacatagttttctttgtcgtgcactgaaccccaagagaaagtgaaaagccccaaacatttactaactcatactcacagtcttatgtatatcttgtagttgttttaacgaactaataaaaaggggaccaatccaccttgaaatctgacgggattcagataaacatacgtatcagcccctgcgacccgaaaaagttccaaccccgaccatctcccaaccgattcccaagcagaaaataacatttaattgcactgttattaacgattgatctctatatttaaacgatccgcattcggatcgcaattcaggcgtggtcctgttctcgtcggcggtttatttcgcggaggctggcagcgacagttcctttttcaagtcgataccggacggcttctggtgggctgtggtgaccatgacgacggtgggatatggtgatatgaggtacagcccaagtttcagctacacactggtgtggtcccggcaccagcaactctcgatcccgccttctatatctacacttatctctctctctatctctctgtctttcttaatctctgtctgtctctcttctttgtctgagtgtttgtaactgagtgttgtacagtctctcccatatctcaactatatgtctttctaacgctttatgtgtgtcattgatgtttgttgctttcgtcatttcgttaatgctaatgtaaataagtctggcaaaacggtggttccattcccatacgttccgcgctcaggctgtgcccggtgtacagttatgtccgtccaaaatacgatctgtgtaaaaaagaacgatgtgaatataaatatgccataaatgtgatgttgtggtgatcgctcgcttttatggaccttaaccctcctccttactccttaccaccaccaaccaacccattgtgttttttgtctcatttttattttgattttcttatgtgtttcttctgtggcatgatcaattctacgttttgcgtcgccgtccattttccattcccttttacgttttcatctgttttgcgttatgtttgtccttagtatgtacctacatcccccactccgcatcccactagtcccgtataaataaaataaaggaatggagtcaaatttcgttttcaagacattcgatctatggtccactatcgccgtttgttcgacccccaaaagtatcaccatatttctgggcacatagaagtagtgcgaacaacgggaggctcaccagaaaccgatatcctacattgatcctcctctctgtcccacaaaccataagtgtttttgaaaagcgagcccccgaggtaagccctgattttctgcttgggaataccgccggattgtggtcaaatcgatcgaggaaactcacgtgaatatatgaaaactcttttaagttgaaccgaaatctaaaatcttaacactgaaacataatcaaatgccgccgtaccagggctgcgaaatgtattttggaacacgaatacccaaccatcacatacgtacaccaacttgacgagcttccgacgcatccagacataaaagacttactttcaaaaaacactctttggttaaatgttaattttgaaaacaacaaaaaaaaaaacaaaaaaaagaaaatcaaaatgaataaataaaaccaacaaaaaatcataaaagaatatattaccaatgcaaagcaatgtttctcccatcaatttttttaggcgtcgtactcttctcatcggcggtttattttgcggaagctggaagcgaaaattccttcttcaagtccatacccgatgcattttggtgggcggtcgttaccatgaccaccgttggatatggtgacatgacgtatgcaaatctatacaattctaacttttatgattacgtttacgataactccagttttgattttacgtttcgtttccgttatcgtttcgttttcgtttcgttcccgccttgggagcgccttctttctaggcgttccattccttctccgttccacctctttattctattctaattttaattttcaactgtttcgttacttgcgtttttatgagtgattattgaaagcccgcccaaaaaaaaaaaaaacgctaaacccactaaagctatttaccgaaatgtatccaaaactaatgtacttcttgttaaccctttgagttccttatctcccaattaataatatgcaaaaccaaacataaacgttgttgtctcttactttgactcgctgagctgtttgtttgtatacgtatttgtctataacgacttctattcgtatttgtatttgtctttgtctttcaactcttgtgttaaattcatttccgttttgtatcgtttaacgtttttcagttggcatcagtctttctttctcgctcgcactagctcaccctccatctcgctctctcgcgtgttccgttgccattacattgtgattccaccatcagtcttttagcagttcttgtttttttgcgccaatcttaagtatatcgcttttaatttccttatcgcaaattacctatgtaacgttgtgtcgttgtttagttcacaaaaataacggaataacatcgaaatataccgaaacaagtcatcataagttcaactcgattctattctcataccggtcactgtaacttcatagtacagtgccgtccataatcaccatcatctaacactaaaacaagaactatacgaacacacacacaagcaaacactgggtgatggaaccacgcccaccgagcgataacgataacttcatttgctggccaaacagtttatcgagcttaaccccctaataccattacaacgaacacaataaagctggagaaaaaaataaaggatgaaggagaagaggacgagcatgctgcatgtgcccgataaacacacttacccacttacacaacacacacacccacaactaggcgccctcatccacacacacacacacacagacactaaagtttagctacagccgcctaatgagcaacaaagcccagtcgcctgccaaatcctattgcctatgataccaagataccaggaaccccaccgaaaaaaaatccccctcctcatttttccactttccaactttcacaggaggaaaaagttttcgccacacccacacacatgcaccaggccccctcccacgcacacacactctaacacctgagccagttgctcgcacttatgcaataattatgtctgtatattagcacacgaacaagccgcctcaaaaactgcaaacagaaatgaagacaaaaaataaactgtacagaaaataccatatatacccaaatatacatataaacgcttaacacacccgttgttctaagtgttgtgccttcttctttcgactttcgtactctttgcgccactttgatttgatttgaacgttctctgctagactaatgcctactcaagccctcctctctctaaatatttacttatataagcgtatacctatcgatatctatacctgtatctgtatctatataatgcgtaatgccgtataattttgccaatgcataccgtatatatgataaaacaaaagaacccaacgcaaaagaaattctaagaaaaaacgagagttttactttacatttcttatatatttgtattttcattttatttatatcgttcgttcgttaacatcgctcgcttccatccaaacaaacaaataccaaaaatcaattacaaaaaaaaaaaaccaccaaccaactccaaaattctcaattcaaataaaatatatatcaattgttaatcaaaaccaaaaaaaaaaataaaaacaaatatccccaacaaccaacaacaacaacaaattgcaccaatttcttaccataaaaatcttataacaataatcaaaataataaatgcaaccctaaaacgccgggaaaatttgtatgtgcaaatgattgccaatcaaaaattgcattgtaattgtatcgtttatcgtttgacacacgatcacgactatcgattgaaatcgaattcgaaattgaaaaaaaatgaattgaaaaattttgaactatgtgaaacaaccgattgattgattgattgatttattgaatgattgaacgattgattgattgatggtacagacccgtcggcgtttggggcaagattgtgggatcactttgtgccattgctggcgtgctgaccatcgcactgccggtgccggtcatcgtcagcaatttcaactacttctatcaccgcgaaacggatcaggaggagatgcagagccagaactttaatcacgttactagttgtccatatttgccaggtacattaggtaagttcaacactgtgtgtgcacaaccccactccgaaccgaagccaccccccccccgtctcacaatctctatcgctttgtgccacctatgatatacatatgcgttgtggccttggctcgaaacccaaccattccacccccaccttgtactcgattcgcatttacccaaacaaacccaccgtccaccaagaaaaataaaaaaatatatatacatatatatgaaaaactcgcaacaagccacccaaaatacgaaccacccactaccgacagaaccaccaaaacccaaccacaaattcaagtagaacaacaaaaagtagaacccgtcgaataaaaatagaaacatttacgaagaaagaaacgaattgtggatgccgatgctgaagccgaagtcagtgccgtgtgccccaaaaaggaaccaccgagaaagtcaaatccgaatccgaaaacccaccatccatcctaccgattggcaccaccaagcggatggatctcgagcggatgggcaccggcactgctttcgagccagacacgctgtcacacagagaaaaaatatcaccacaaatcggtcatcgatttccacacagtcacctttgatctgaggcatatcattgattattgaatctttatggaatggagatttcaatgccccaatctttttttttttttttgcatatacttaagtttaaccatatcactcagaaaataataacccacaccaatactgaaatataagaggtacgatttattatgctatatccaaagatcttatgaccttatcatgtccatagcacctgtttaaataactacaagcgttgaatgttaaagttgtaagttgttaacctttcgattgagctggaagcattacaaaatgagaattttttccactcccccctcaataaacatccacaatgtaatcttttcacaatgatatgccacagatgattgccatagcttaaggtatttgcatgattgaaaaagtcgagatgacaatatgaaacagatgttatgttttttctctgtgcactgccgaacacccaccacccctccgaggcaacacctaattggctggtgggctggtgggtggcgtgctgcagcgccggtgggtggcaaccctgtcggtggggcagcggtataccgcagtattgacagcggtgccacaaccaacgtgcacgtactgtgtgtgttttgtgtgtaagcgagtactacagcaaaaaacattactgtaaccgatgcattacaactgtatgtgtgatctcctctttctctcttctctctctcttctttttgtttctctctttattccgtcaattgtatggccaattcgaatatcgaaacgcgacctccacacaaataattcctcaattaatacccgttaacccgataacccgaaaaccaaaccaaattcaaatcgaactcgaacccatccatccaataaaaaaaatccgctcctgcatccctggcattgtgtgaatcccctcaaatcaaactcacgtacacacgtcatatctacacacacacacacacacacacgcataaaacacgcataaaacacgctctgtctgccaacgcgtgatatacactgcgacaaaacacactaaacaaatgcatacaaaccaccaagtaggtcaacacatgaagaaatcatcattgtctgagtcctcatcggatatgatggatttggacgatggtgtcgagtccacgccgggattgacagaaacacatcctggacgcagtgcggtggctccatttttgggagcccagcagcagcagcaacaaccggtagcatcctcactgtcgatgtcgatcgacaaacaactgcagcacccactgcagcagctgacgcagacgcaactgtaccaacagcagcaacagcagcagcagcagcagcaaaacggcttcaagcagcagcagcaacagacgcagcagcagctgcaacagcaacagtcccacacaataaacgcaagtgcagcagcggcgacgagcggcagcggcagtagcggtctcaccatgaggcacaataatgccctggccgttagtatcgagaccgacgtttgactactgggtaagtgttggaaaacgccactcgcttgctgcacagacccgacccccctacccatcactaccaccaccaccaccaccacaaccaacccccaacaacttccatctttgtcacactacctagctatatattgctacggcacactcacttctcagaccccaacccaaacaccaactacccaacatcaacggaacccgtgcaccctgactcgtagagcgtaactaggtttaagtgttgcaaaatgcgaaaagcaatatgcaaaattccaaaacggatcgttcgcactggcagccacagatgcgccacagcggaaacagtttcgtttgcttcaaagtgagtggaaaataatgcacgttaacacaaatgtcaaagcaaaattgaatttaaatatttaatttcattcgcatacttagtcaatctactgcgtttttaaaggatcccaaattaaaagatctccattaactatcgcgaacaatatatgtattaacttcaaatttatttttgaaaacccataaactattttctctgtgcagtgcgaacatccgaacaaataaattgaactgaattgaattacgatttgattagaacataactttttctctcttttctcttcacgtggcgcgctcctctacctacgcgatacacatgtttgcctatgtttacgtataaacctaatcctaaacctaaacctttgcctacgtctcgatccccatgtatgtattaccatatgtttgatctatatgtatatatgtatgacgaatgaatcagtgcaaaagacgttgcgtggtataaatttggccttgacaggagttacgttggatgccagaaacgactacaaaagctgtttatatttaatttaagtagaacaaataacaaaaacaaatttaatctattgctaaattaaattaaaatctaaattaaaatctaaattaatttaattaaattatacatttaatgataaacaacactaaaacaaaaacaaaaaattcaaatccagaaataacaaaaggcaagaaatgaacggtaagagagtacgaataaatccgtatagtaaggcataaaccaaaagtccaagaactaataaacattgacaaataacactacataacagaagggacattaaagcgacagcataaacatcgaagaagtgatggcagaatttaatttaaatttgcaacaaccgaagctaaataacaccgcgatcaagctgtaagagcaaatggaaactgtaaataatgcaataaaatcacaaagctcacaagccattatattttagcaagtataatacagtgaaaaggcttcggaacttccatccaaaggacgaacaatgaagccaagcacagtgaagcaagtccatattgaggaatgtccctttgaagagctaaaagaaatagacagcaaagatttacgatctacaaagcatgcagtcaccgaaacagacacacacacacacacgcattactaaaaaagtatagaaaaactgccgttatatttaactgaaaagtaacaaagaagaaccataaaaccaaagccaacatgtatagtcatcaagcgaaacccgaggcaatatctgctttttaaatgtgacagaaaatactatcgtgtaacttagacagctagccatctgtaactgaactactgattaactgaactaaccaactaagcatatatacaccacacacatacctatatgtgatatatgtatgtattatgtgtgtaacctaatcaatatcgttcgtaacactactcaagaccctattgttttttgactaaagcttaagagaaatccagaaccctccacctatacatatatgcccacccagtccacttctaacctctatccactgaacaacacatattaactaactgaacccatatcagctataacttctgcttcgatccccccgaattaaaacgaaataaaaagtacaaatattcaactgaaggcaaacgcgaaacaactaacgttactcgtaagctattacgattgtttaatggaatttcgaagaaaagggaaaggcgaaacgactgcaatttaactacaagaccgaaacgaacattaatggaaacatccaatggattgctcgtattccccactcacagatccgctcaatcacaataaataatatcacaaaaccaaaagattaaatggcgacaagagatacaacaaaaccgaaaacgctcttatgatttttgtaatgaatgcaaactatataagacaagatgaaaaccaaaaaataacaaaacaaatggtaaaagtttaacactaaattacggggctctccagcgatgatttctttgactgaattgcgggggttggtcatttaaatccattcccaccacaagaaaccccattcacagcaaacaaaatacaagaaattgttgactgaaccatgcgaattcaacttttgcattaaatgtattataacagagacactatagtatgaagatatatatttatgtgtgtgaatgtaactgcatagatgaatatatgatatcatatatatatggattcctatatataggatacctgtacataagaaaggttgctctaatcgatgttaattgatggatagcaacgatgccaacaagataccccgatcatatttgagtgtaatttttaaaaagcttcgaaaaccgtccacacacacacacacacacacgctaacgtattcaacacacacacacagacacatatagaagatatggatatgaatggggcgatacccaatgtcaggggcgaagagctagaaggggttccagagtcccaagccaacaaaaagatccggaggagcagagcagagcaaagtgccttaaggaacattgtaagctggccgattcgaccccctttgtcgtgtctcagcccctcgattgggaatatggccccccctttttcttttttttttttttttgcacccgcccctgcaacccctggcaattcagtagaaccagctgaaaaagctaacaataatgcaacgtttccaaggtgccacagtggaggccagacaaagggccgaacgatacgtggacaccgtgtaaatagtcgctacccagaatcccaatgatatagggtattcccactgtggctgctaactgctgtaaatactatccaaatacaaatacatcttgcaaatgcgattttgtacaaaaaaaaacaaaaacaaaaggaaacaaaaaccaaaaactaatcctaacgataaacccaataaaaactaacgaaattaagtaataaataaataaataaaatgaaatgaaagagtataaaacatttaaatgtcagctaagtgtactgtacgtagtttttctttatctgtaagaatgcaaagatttaagaaatgaataagcattagagaagataacgataaagataaaggtccagtcgaagatgatgaaactagcaaaacaccaaagacgaacgaggatattgaggagagggaaatgaagcgtaacgaaaagaaaaccgcctacttaagattagattttatgttttagatcgatcgttcgaaggaaatgattttagcttcattaatacaagattaccagatagcggataaaggttaacgataaaagataccaaaccacatgaaatatgaacatgaaaatgaatccagatagcgatacaaagagccgagtgtaaagtaaggttgtttttttttcctagccttaatctagacaaatgaataaatttagcaaacataagtgtaaatgagtctaagaattgccgatgtatagctgaatttagaattttattttaattttattattacgattatatgttcatattttgtcctacattttaagactttgatttaatcacaaaataagccactataattaaacaacagcaaaaaaaaaaaaaaggaaaaacacaaaacaaaaaccacaaataaaatgaagaacaagaaattgaaaatcgtgttaatatttacctatgaaagcttaacaaaaaacataaattataaaatgaaacaagaaaaaaaaacagaaaaaatttggaataaatgtgttcagcaaaagaaatgttattatatgtttaaataaattacaattaattcgaaatgaacaaaaaatttaatgtaattaaattgagctaagtacacgagtaaaattctaaacaatttcaaattgtacataaacagcatatacatatacagatacatttagcatgtagcatatatctagacatatgcatatgctgcatcccgaattacaagctagctaatcgcagactaagcgcagactaaaatacgaaaaaaaccaaaaccctgaacataccaaagacacacactcaagcaagatgaaccagtgaggagattaggaaaacggaaccccatgctgatccaatccgatccgagtccacaataaagaagcgatatcgaagcaaataaattgagaaaagtgttttcgaaacgttttttatttcgcacagtcgactgtgcccactccctccaccaccttaaatagtatcccccttgtaaatagtattcaaattatccgtctcattccattccgattcgctccgttccgtttcatacctgtatgtatacctacacatatatattttctggtatttgtattttagccttagatccgtagttagtcgagtcgaaatggaaacggaatgaaaaccggaaaacggaaaccgtatccctttcgatttaggatctagtctgaagcaaaaacgctagttctgtattcttagtttgtattgtaattgtattagctggcgctcaaaaaaacccaaatgtaatgaaaagttctaaattgtaaatacatatttgatttcgtttcgtaacgtacgagtatcttgtgtgagctcaacctaattttcgtctttggcatatcaatcactcccaactgcagttgagttatccgatccgtaatcagtaatcagaaatcagtaatgagtcaatcagtcgatcaacgctaaccgatacatacgctaacccacatacatacaatatatactacatactaccacatacaccgctctcacgtacatacatgatttaggagctgaaagcgcatttctttcggttttcttattactttcatatgcttgaactatgctctctactcaactctacgctctactcaactcaactctagtctagcctactttaatccaaaagcgaaatgcattaaacgaaatcgaaaaacttagggcgatatattagtgaatagaatcccaggaaaacaagaacaagaagatgataatgatgatgatgaagaagcaaacatatcgttgtaaagcaagaactaagttatgaaaaccataaataactcaaatgaaaaagtctaacttatgatgcataattattttcgaatataacactaacacgccacaacaaacattcgacttctccagttcaattccaaccaaaaacaatcttttcaagttttccattaaatataattgcaaacctaacaaaaaaaaataaatcttaacacgcatacgtaaacaaaaaggaatatttatataaaaataatgaaaaccattttgattgtacggactataatgaaacaatacacatttaccaaatgctatgtacgagtaaatcaaaacataaaccaacaaatggaaataaaaaaaaaaaaaatctttcaaaatcttctcaatgcttcaagaacaaacaaaaagaaagcaaatttctcttaaggacaaagactgcaaatagagatttaaaaaaaaaaaaaacgtacacttaaaaagcaaaaggaaaaaccaaaaacattgataaattaattgatttttaattctaatttggccttgattcaacctaccaggaaataagtttaggtttagttagaagttcaagacactacaccacacatcaccacacaataccatacaataccaaccaaaccggaccggaccggacagaactgaatcgtatcgaatcgaatcgtatagaacttttgaatttgaagaactccacccgaaccgcagacatttatgagtagtatcagaaatagcactttttttggaaataatagcaacaatcatgcagaaccaatgaacaagacccagtcacaaacaagtacatgaaagcagatgataatgataacatacatacatacatacgtacataaaatacaaaaactcgattcgaacacgatgaagtcgcaataatcaccattgacaaaaaatctagtattacgcccgataagatattacaaagctaaaacgaaaaccgaaactcacacacagaaattaaaccgaaaaaaaaaccaaagaacgcataatgaaaacaaaagaaaacgaaaccaaacaaaaatggaaatgttgttaagattaaaaatgaaatgttttataatcgttattcaataaaaataaaaaataaataaatttccaagaaatcattaaccaataaacaagcaagcaatggcgcaattcgaattcattcgaacaattctagctgtaatctaccaccatctcaaccaatctgccaatctatcgatcttaccgattcttgggaaataacccaaccgactgatcccgaaagtcacatttgatccattttagactagctggtagtatttcgtactttatgttcgaatttctaacttattattttgttggttaggcctattcgcaagggatggcattagatctagttagtcactacgttattcttattcctacagttatcgtaattataagccttggctctagttacctagatctaagtccagatccttccctacgaaaaggggggcttggcacctccccttttcttgtcgaacacgcagacagacaaccctacacacacacacccgagtcatttaccattatatctacagtaaatatactatatatacatacatatatatatatatatatatgtatgccatgccatgccagtagcacataccattgcagacatatcctagcgtagtttagctcttttgcccacctccccccacactcccccaaaaagaaatgcatacacacactatcgccgtgagcacacactaatcgcagatatagcgatcaatcgagtgagaaaagtaacgagagtacacttaaaaaagaatacccatacaacttactgaaaatcttggaaagttgaagtccaaacaggttaaatccggccccggcagtcaaagcgatgataatcaatccaacgaacggtgagtttaagaaccctcgagacccctctccaaacccccggttatcctatatctatgtctccgtctcgttagcaatgccctttgatatgaatataaatatatatttatactatataaatttctctcgctccccaagaaaaaacgcagtctcagtcggttttcccataaaattgtatctctttctctctctctatatatatatatatatttctgtattatgttttgactttgactaatcgaattcgtttttatttcatttttttttttctgcgtatgaatcttcattttgattttgcctatgccctcggatctgcgctatatgccactctcgaccatattattgatataatcgtatatggaatattttgtaaacttttgcttacgttctccctcctgcgccgaatgtaaaactgtaagaatcgcttcagcgctcagccgcctgcacctgctcagccgacgctcctgcgctatcctgctataccgtaaccgttatcgttgccgttaccgttatcgctatatcattaacgctatcgcaaccagaaatgccagcagcagcagtagcagcaactgcagcagcagcatctgtagcatctgcagcatctgcagcatctgccgcagcaacaacatcagcgtctagaacaacaacgaacaactaggaagatctaacagccctgtcaaaatgctgaggctgtgcggctcctgcttctgctcctaagtcccgtttccctgtgcttcccgattccggtgcatgtgcaatcagttgctgtatccaatcgaaatcgaataacaatcgaatatcgatattgagatcgcgacagtaccagaatcagatcgcgtcaagcgcaatctgccagcaaattcaaatccaagcaaagcaaatcaaagcaaacaaaaagcaaaagcaaagcaatcccaaatcaaaagcaaacaaaaacaaaacaaattgcaaaacttttgcaagaaatatacacaacggcgcacgcttagcacatttgcattcaaaatacaacttacttgctacctatatctccacagccaacatacccaaaatacacccaacacactctaaacacacagacactatcacacaggaatgcatacaccaactaaagagttaaattgaaacttttttggcttttctactcactttgaacacgttttttctctcgctttgattttgatttcgttccttgactcgagtactcgaatgagcattatatcagcaactactctttgcctaattacgatcgcttaactatacctaatctctatgttacgaacacatcaaaacgaccacgtccccaattaaaaaagaagacacacacatccactgctgcacggcaatttgtctgttgggtcggaagaattgccgtacagctttgtccactcatggccattatcatcctaaaagagaaatcaaaaattttaagcacacacacacagtcatgacacacacagactatcgaaagaaaacttattaaatcatgcacccaaaagtacagtcagttcaaaacatacagtcagacagtctatacagacgatccaaaccagaggagacgagcaagcaccgtacggcgacgatgaagaagaatgggacgagatgaaccagacgaagaagaagcgaaaaaagaagaagaactcgaaggccagtcgatccagctatgtgtctccctcccacctccgcgccccaccgctgtgtcagtgtgtgtgtgtgccgaagcagtcggcggatggctccttttgctatccctcaccgttaaccgatcgccgatccctgaacgatgatcggcggaggatcggttcgatttgctttggtttttccacacatctctatctatgtatattcattttatgtcaagtttaacagcgacgacgccaaacgccggcacattttgtttattccatttggcaataagtacgcttcggttttttgttagccaaatcaacccgcaattcacccatcaatctatatgtataagtacgaatagtatgccaccatgatttcgtcttcttgatttttgaaattaatttacggtttcgactttggttttgatttgagttcatagttacccaccaccccagttggttgttgtaaccgattttggttaccgccaacgaattgctttcgatgtttgcatacaaatacctatacgaataccattaaccagaacaataacaataacaataccacccctatacctatatataaaccaatacctagttgagcttatagttttgacttttgctttcccctgtgttgagttatcgcttttccacctgcctccccacccacggatacttactcgaacgtctccagccaaccatttgtaaacccaactcgtatcgctttatttaagtaacccatatgtatctgttgtgacacgtttttcttttttgcgtttttaacaagtttttaacactttagttgggccgggagccacgagctccggaccccaaatctaacccactatctagaatagtatatcgaatatatcaaaacttataactcatttctacttgtttgtttttttaccacctgatttacatactgcgttcttcttctacgttcttcttcataccaataccaaatcaaaaaccaacaaaacacaccaaattcaattgactttgaaacgaatttgcatatttaaacacggatcggatcggatcgaaccgaatcgaaacgaatcgatttaaatatacaaaccaattcgaactcgaacacacccaacgacaatgaccattgacaaacatgaatcgaatccacaaatattgccattaaacaaacgaatgcattcaacaaaaatgcatccaggcccgtcggcttctggggcaaaattgtcggctctttgtgcgtgatcgctggtgtgctgacaatcgcactgccggtaccggttatcgtcagtaatttcaattacttctatcaccgcgaaacggatcaggaggagatgcagagccaaaatttcaaccacgttacaagttgttcatatttacctggtgcactaggtacatactactactactagcggttaagaaaatcccccaaaaaaaaaatgaaaaaatgatcccctatccctgattcccgcccactctgtgcaacccatataatatccccttgctaatcgttgtatctgatccacgaccccggatgtaggtcaacatttgaagaaatcctcactctccgaatcgtcgtcggacataatggatttggatgatggcattgatgcaaccacgccaggtctgactgatcacacgggccgccacatggtgccgtttctcaggacacagcagtcattcgagaagcagcagctccagcttcagctgcagctgcagcagcagtcgcagtcgccgcacggccaacagatgacgcagcagcagcagctgggccagaacggcctaaggagcacaaatagtttacagttaaggcataataacgcgatggccgtcagtattgagaccgacgtctgactactaggtgagtattggcttgcgtaagtataatcaatgcctcaacgttgggcgccaaatactatagtcacattagctcggtcccatgttgggcgccaataacttttgacatttgacaatttctataaattagtacaacttttgctaaaataatacatttaatttagaaaccgaagtatagtcgtttataccagttaattctgtcaatcaatggaatatttttgtcatgtttttataacttttattatgataatgcaatttctttcgaattgtagcactaaattaaaagtattaaacatatcaaagtagcacacgcttgtccttcatttatatgtgtattgcaaatatatgtatataattaggcaacattgcatttttcggtcacactctttatcgttctcctttgactctatttcgcagtcaaacaaatggaaaatggacgaaatttgcgcagtgaaatgctacgttggatgccagaaacgtcatcaaaagcagtctaatttagaattttattaataaatacaattaaaatataattataataattagtaagcaacgtagttgtaaattaaacagcaaatgtacacagacacaacacacacacagacacagtgccagttcactcagcttgaattagagtatttgtagacaccaaaaagagtcaaatatggactggccttctatagggatttccttgtttctcctttcattttccttctggtaatctacacaccgaaaacacttacacacacacgtccacacacactcaaagtaaaaactctacttgatacctatgttcaaatttagcaattaacaactaacaatcgttaacaacaacaaaacaaaacatataaaaccaaaaaacgagagaaaaaaaaaaacaaacaaaaccaaaatctaattatcttagtagactaatctaattggagtttcttcctttctttagaagctagcaaaacaaaaacaaagaacaacaacaaccagacaaaaacaaacatacaatatctgctaattttattttcatctttaaattatgctctattattaaatattagtcagaatattagtaaaacaaactaaacc

SEQ ID NO: 48 - protein, 643 aa, Drosophila melanogaster
MTMWQSGGMGGHGSQNNPWMKLMGIVHKERRHTENVQSQSGSNERNLNQSLPKLSSQDEEGGAGHGFGGGPQHFEPIPHDHDFCERVVINVSGLRFETQLRTLNQFPDTLLGDPARRLRYFDPLRNEYFFDRSRPSFDAILYYYQSGGRLRRPVNVPLDVFSEEIKFYELGDQAINKFREDEGFIKEEERPLPDNEKQRKVWLLFEYPESSQAARVVAIISVFVILLSIVIFCLETLPEFKHYKVFNTTTNGTKIEEDEVPDITDPFFLIETLCIIWFTFELTVRFLACPNKLNFCRDVMNVIDIIAIIPYFITLATVVAEEEDTLNLPKAPVSPQDKSSNQAMSLAILRVIRLVRVFRIFKLSRHSKGLQILGRTLKASMRELGLLIFFLFIGVVLFSSAVYFAEAGSENSFFKSIPDAFWWAVVTMTTVGYGDMTPVGVWGKIVGSLCAIAGVLTIALPVPVIVSNFNYFYHRETDQEEMQSQNFNHVTSCPYLPGTLGQHMKKSSLSESSSDMMDLDDGVESTPGLTETHPGRSAVAPFLGAQQQQQQPVASSLSMSIDKQLQHPLQQLTQTQLYQQQQQQQQQQQNGFKQQQQQTQQQLQQQQSHTINASAAAATSGSGSSGLTMRHNNALAVSIETDV

SEQ ID NO: 49 - protein, 571 aa, Drosophila melanogaster
MAHITTTHGSLSQATRSLPKLSSQDEEGGAGHGFGGGPQHFEPIPHDHDFCERVVINVSGLRFETQLRTLNQFPDTLLGDPARRLRYFDPLRNEYFFDRSRPSFDAILYYYQSGGRLRRPVNVPLDVFSEEIKFYELGDQAINKFREDEGFIKEEERPLPDNEKQRKVWLLFEYPESSQAARVVAIISVFVILLSIVIFCLETLPEFKHYKVFNTTTNGTKIEEDEVPDITDPFFLIETLCIIWFTFELTVRFLACPNKLNFCRDVMNVIDIIAIIPYFITLATVVAEEEDTLNLPKAPVSPQDKSSNQAMSLAILRVIRLVRVFRIFKLSRHSKGLQILGRTLKASMRELGLLIFFLFIGVVLFSSAVYFAEAGSENSFFKSIPDAFWWAVVTMTTVGYGDMTPVGFWGKIVGSLCVIAGVLTIALPVPVIVSNFNYFYHRETDQEEMQSQNFNHVTSCSYLPGALGQHLKKSSLSESSSDIMDLDDGIDATTPGLTDHTGRHMVPFLRTQQSFEKQQLQLQLQLQQQSQSPHGQQMTQQQQLGQNGLRSTNSLQLRHNNAMAVSIETDV

SEQ ID NO: 50 - protein, 304 aa, Drosophila melanogaster
MAHITTTHGSLSQATRSLPKLSSQDEEGGAGHGFGGGPQHFEPIPHDHDFCERVVINVSGLRFETQLRTLNQFPDTLLGDPARRLRYFDPLRNEYFFDRSRPSFDAILYYYQSGGRLRRPVNVPLDVFSEEIKFYELGDQAINKFREDEGFIKEEERPLPDNEKQRKVWLLFEYPESSQAARVVAIISVFVILLSIVIFCLETLPEFKHYKVFNTTTNGTKIEEDEVPDITDPFFLIETLCIIWFTFELTVRFLACPNKLNFCRDVMNVIDIIAIIPYFITLATVVAEEEDTLNLPKAPVSPQV

SEQ ID NO: 51 - protein, 419 aa, Drosophila melanogaster
MAAVAGLYGLGEDRQHRKKQQQQQQHQKEQLEQKEEQKKIAERKLQLREQQLQRNSLDGYGSLPKLSSQDEEGGAGHGFGGGPQHFEPIPHDHDFCERVVINVSGLRFETQLRTLNQFPDTLLGDPARRLRYFDPLRNEYFFDRSRPSFDAILYYYQSGGRLRRPVNVPLDVFSEEIKFYELGDQAINKFREDEGFIKEEERPLPDNEKQRKVWLLFEYPESSQAARVVAIISVFVILLSIVIFCLETLPEFKHYKVFNTTTNGTKIEEDEVPDITDPFFLIETLCIIWFTFELTVRFLACPNKLNFCRDVMNVIDIIAIIPYFITLATVVAEEEDTLNLPKAPVSPQDKSSNQAMSLAILRVIRLVRVFRIFKLSRHSKGLQILGRTLKASMRELGLLIFFLFIGPSASGAKLSALCA

SEQ ID NO: 52 - protein, 655 aa, Drosophila melanogaster
MAAVAGLYGLGEDRQHRKKQQQQQQHQKEQLEQKEEQKKIAERKLQLREQQLQRNSLDGYGSLPKLSSQDEEGGAGHGFGGGPQHFEPIPHDHDFCERVVINVSGLRFETQLRTLNQFPDTLLGDPARRLRYFDPLRNEYFFDRSRPSFDAILYYYQSGGRLRRPVNVPLDVFSEEIKFYELGDQAINKFREDEGFIKEEERPLPDNEKQRKVWLLFEYPESSQAARVVAIISVFVILLSIVIFCLETLPEFKHYKVFNTTTNGTKIEEDEVPDITDPFFLIETLCIIWFTFELTVRFLACPNKLNFCRDVMNVIDIIAIIPYFITLATVVAEEEDTLNLPKAPVSPQDKSSNQAMSLAILRVIRLVRVFRIFKLSRHSKGLQILGRTLKASMRELGLLIFFLFIGVVLFSSAVYFAEAGSENSFFKSIPDAFWWAVVTMTTVGYGDMTPVGVWGKIVGSLCAIAGVLTIALPVPVIVSNFNYFYHRETDQEEMQSQNFNHVTSCPYLPGTLGQHMKKSSLSESSSDMMDLDDGVESTPGLTETHPGRSAVAPFLGAQQQQQQPVASSLSMSIDKQLQHPLQQLTQTQLYQQQQQQQQQQQNGFKQQQQQTQQQLQQQQSHTINASAAAATSGSGSSGLTMRHNNALAVSIETDV

SEQ ID NO: 53 - DNA, 2679 bp, Drosophila melanogaster
ctcgatagtacgacatcatcatcctccacacagcagaccttccctggcagcgcagtcggggcgggcagaggagcgtcagcagcggtacctggaagcgggacagcgatagcggttgcagtagcaggagcgggagcgggacaatcggcgacattggcggggccgccggcaacggccgcagctgccacagctgcgatcataccgattctgccgctcggcgttgcaacgctgcgcgatgattccaccgaatctgagcagtccgtgacctgtgcgcacaaccagctcgatgcctaccaccgcatcatgtgccgggctcccattgcgtcactcgactgtatggaggagttcagtggtacgggcggtcatcttgatttcggtcgttcgatcagtttgggctccaatccggcgctaccattgcgccatggatccacaccaacgccgggactgcggtacaagaatctgggcaaaagcgggttgcgtatctcgaatgtgggattgggtacctggccggtattttcgccgggcgtgagcgatgaccaggcggaggcaatccttaagctggccatcgagagcggtatcaatctgttcgacatctcggaggcgcactcggagacggagatcggcaagatactgcagcgggcgggctggaagaggaccgcctatgtcatcaccacgaaggtctactggagcaccaagtcggaggaacgtggtctctcccggaaacacatcatcgaatgtgttcgtgccagtttgcagcgattgcagctgcagtacatcgatatcgtcatcatccacaaggcggatcccatgtgtcccatggaggtggtgcgcgccatgagctacgtgatacagcagggctgggcaatgtattggggcaccgctcgatggagccaggtggagatcatggaggcctataccaactgccgccagttcaactgcatcacgcccattgtggagcagtccgagtaccatatgttctgtcgcgaaaagtgcgaactctacctgccggagatgtacaacaagatcggagtgggcctcatggcctggggtccactctcgatggccctcagcgacacccagaatggggacaagcttttcctgcccaagggctccttcaagacgaagagcttctcgtggaccgaggacgagatcaatcgtaatgccgctctgtcgccgcagggcagttggggtaaggaccggatcgatgaggggcgccgccactgcgaccgtctccgcgaccttgccgccctcgccgagaagctgggctgcagccccacccagctgtccatcgcctggtcgctgaaacatgagccagtgcaatgcctgctgctgggcgccacatcggcggagcagctgcaccaaagtctgcagtcgttgcagctgctgccacgactctcatcgagcgttatgctggagctggaaaggatattggaaaacaagccggtgcggccgccgatgatctcgaccttggcgctccggtgacaatcagcgtgcccgcaggggccgctcagcctgagcggtggcggaccctgcggcgccgattcgcccaagcacgaggatgaggccttcatcgaggaggtggacgctgccaaggacgctgccaagcaaggcttctgcctcatccagtgacaaaaggagtccttagataacgataataaatttttgaaagtgattagcagtaaaactagcctaagtagcaataccatgacgacaacaataagcaagcaggagcagcaacagcagcagcagcagcaacaacagcagcaacatctccagcctcagcagtatgtgcaactacagcagcaacatttgatggccagcggcagcaccagcgattcggcggcagctgttcccattgcagctgaactccagttcgactccctgaataacaataacaacaacaacaataataataccaatggcagtccggaacaggcactgcccaccagcgatgaacgccaaaaacgtcgctccctgctcaactttaagtccctggactttcatctaaagtccctgtacagtggcctacggagtaactcaggaacaactccacccagtcaaccgaatagctctgttccggcggtggatcagccgcagcgtagaatgccctatttgcgggtggagagtgttgatcccgaggagccaagaggatcagttctgcccggacattcgcccagctttctgtcaccctacagtggcgttggcggtggagccggaagcctgcagttgccctcaaacgatggaggcaccatcaggagatcctcaacatccgacattgttaattgcagacggggagggggagcagggggatcgggcggaggagcagcctctgcccaggacagcaggaggccgagcacatcggatttgctcagaaaggcaagggaacgaaagggcagtgaggccaggatgggcagaagtgtctcccacagtgggctaaccaggggcggacccggcggaggaggtggtggcctgggcgggagacgaaccagcatggccttctaaaaacagaaataatagtgaaaaaaaaaaaaactatggaaaaaaaaacttaagcaatgaggtatggcgaaaaaaaaaactgttgatcaaatctgaatcagaaataggctgacaaaatggcgcttatgaatttttatctagtgaaaagaaaattaaaaaaaaaagaaaacaagaaaaaaataa

SEQ ID NO: 54 - protein, 547 aa, Drosophila melanogaster
MSMALCNLNGDGSAAQSTSQSQSQSPAATAAAAPLLPHSHSHTLQPESTPLLLGHEQSGSAAPEGSGGGDVTDGAVTSIEMPTVVADDAGVPPLPLPLPQSTPQPLLMALPANLNFITGPTTQQLMIGNGAMGVIPSTNDSNNNNNNNNNVDNTSDESNPVTIYRCRAPIASLDCMEEFSRSISLGSNPALPLRHGSTPTPGLRYKNLGKSGLRISNVGLGTWPVFSPGVSDDQAEAILKLAIESGINLFDISEAHSETEIGKILQRAGWKRTAYVITTKVYWSTKSEERGLSRKHIIECVRASLQRLQLQYIDIVIIHKADPMCPMEVVRAMSYVIQQGWAMYWGTARWSQVEIMEAYTNCRQFNCITPIVEQSEYHMFCREKCELYLPEMYNKIGVGLMAWGPLSMALSDTQNGDKLFLPKGSFKTKSFSWTEDEINRNAALSPQGSWGKDRIDEGRRHCDRLRDLAALAEKLGCSPTQLSIAWSLKHEPVQCLLLGATSAEQLHQSLQSLQLLPRLSSSVMLELERILENKPVRPPMISTLALR

SEQ ID NO: 55 - protein, 392 aa, Drosophila melanogaster
MCRAPIASLDCMEEFSGTGGHLDFGRSISLGSNPALPLRHGSTPTPGLRYKNLGKSGLRISNVGLGTWPVFSPGVSDDQAEAILKLAIESGINLFDISEAHSETEIGKILQRAGWKRTAYVITTKVYWSTKSEERGLSRKHIIECVRASLQRLQLQYIDIVIIHKADPMCPMEVVRAMSYVIQQGWAMYWGTARWSQVEIMEAYTNCRQFNCITPIVEQSEYHMFCREKCELYLPEMYNKIGVGLMAWGPLSMALSDTQNGDKLFLPKGSFKTKSFSWTEDEINRNAALSPQGSWGKDRIDEGRRHCDRLRDLAALAEKLGCSPTQLSIAWSLKHEPVQCLLLGATSAEQLHQSLQSLQLLPRLSSSVMLELERILENKPVRPPMISTLALR

1. A method of screening for a sleep altering composition comprising:
(a) providing a Drosophila cell;
(b) contacting said cell with a candidate compound; and
(c) measuring the effect of said compound on expression level or activity of a first gene product encoded by a gene selected from the group consisting of CG18190, Jheh 1, CG7228, lama, disco, CG6664, Casein kinase II β subunit, CG9171, GstE1, cAMP-dependent protein kinase R2, CG15161, MESR3, Meics, Atpalpha, Calx, Rlip, nompC, H15, Lam, Glu-RIIA, Glu-RIIB, Ork1, Shaker and Hyperkinetic,
whereby a change in the expression level or activity of said gene product, as compared to the expression level or activity of said gene product in a similar cell not treated with said candidate compound, indicates that said candidate compound is a sleep altering composition.

2. The method of claim 1, wherein said Drosophila cell is a neuronal cell.

3. The method of claim 1, wherein the cell is located in a living fly.

4. The method of claim 1, wherein step (c) comprises measuring said expression level.

5. The method of claim 1, wherein step (c) comprises measuring said activity.

6. The method of claim 1, further comprising measuring the effect of said compound on the expression level or activity of a second gene product from said group.

7. The method of claim 4, wherein measuring expression level comprises measuring mRNA levels for said first gene product.

8. The method of claim 4, wherein measuring expression level comprises measuring mRNA turnover for said first gene product.

9. The method of claim 4, wherein measuring expression level comprises measuring protein levels for said first gene product.

10. The method of claim 7, wherein measuring expression level comprises a technique selected from the group consisting of quantitative RT-PCR or Northern blot.

11. The method of claim 9, wherein measuring expression level comprises a technique selected from the group consisting of ELISA or Western blot.

12. The method of claim 5, wherein measuring activity comprises an assay for enzyme function.

13. The method of claim 5, wherein measuring comprises an assay for binding function.

14. The method of claim 1, wherein said composition promotes sleep.

15. The method of claim 1, wherein said composition inhibits sleep.

16. The method of claim 1, wherein said composition promotes recovery from sleep deprivation.

17. The method of claim 1, wherein said composition reduces the need for sleep.

18. The method of claim 1, further comprising measuring the expression level or activity of said gene product in a similar cell not treated with said candidate compound.

19. The method of claim 1, further comprising treating said cell with a known sleep modulating composition.

20. The method of claim 1, further comprising assessing the effect of said candidate substance on an organism.

21. A method of reducing the need for sleep in a subject comprising modulating the expression level or activity of a gene product encoded by a gene selected from the group consisting of CG18190, Jheh 1, CG7228, lama, disco, CG6664, Casein kinase II β subunit, CG9171, GstE1, cAMP-dependent protein kinase R2, CG15161, MESR3, Meics, Atpalpha, Calx, Rlip, nompC, H15, Lam, Glu-RIIA, Glu-RIIB, Ork1, Shaker and Hyperkinetic.

22. The method of claim 21, wherein the expression level or activity of one or more gene produced encoded by a gene of CG18190 or Jheh1 is increased.

23. The method of claim 22, wherein the expression level or activity is increased by providing the gene product or an agonist small molecule to said subject.

24. The method of claim 23, wherein said gene product or agonist is provided to said subject multiple times over a defined period.

25. The method of claim 21, further comprising providing a stimulant to said subject.

26. The method of claim 21, wherein the expression level or activity of Ork1 is decreased.

27. The method of claim 26, wherein the expression level or activity is decreased by providing an antisense molecule, a ribozyme, an interfering RNA or an antagonist small molecule to said subject.

28. The method of claim 27, wherein said antisense molecule, ribozyme, interfering RNA or antagonist small molecule is provided to said subject multiple times over a defined period.

29. The method of claim 21, wherein said subject suffers from a sleep disorder.

30. The method of claim 21, wherein said subject suffers from environmental sleep deprivation.

31. A method of promoting recovery from sleep loss in a subject comprising modulating the expression level or activity of a gene product encoded by a gene selected from the group consisting of CG18190, Jheh 1, CG7228, lama, disco, CG6664, Casein kinase II β subunit, CG9171, GstE1, cAMP-dependent protein kinase R2, CG15161, MESR3, Meics, Atpalpha, Calx, Rlip, nompC, H15, Lam, Glu-RIIA, Glu-RIIB, Ork1, Shaker and Hyperkinetic.

32. The method of claim 31, wherein the expression level or activity of one or more of CG18190 or Jheh1 is increased.

33. The method of claim 32, wherein the expression level or activity is increased by providing the gene product or an agonist small molecule to said subject.

34. The method of claim 33, wherein said gene product or agonist is provided to said subject multiple times over a defined period.

35. The method of claim 31, further comprising providing a stimulant to said subject.

36. The method of claim 31, wherein the expression level or activity of one or more of Ork1 is decreased.

37. The method of claim 36, wherein the expression level or activity is decreased by providing an antisense molecule, a ribozyme, an interfering RNA or an antagonist small molecule to said subject.

38. The method of claim 37, wherein said antisense molecule, ribozyme, interfering RNA or antagonist small molecule is provided to said subject multiple times over a defined period.

39. The method of claim 31, wherein said subject suffers from a sleep disorder.

40. The method of claim 31, wherein said subject suffers from environmental sleep deprivation.

41. A method of inhibiting sleep in a subject comprising modulating the expression level or activity of a gene product encoded by a gene selected from the group consisting of CG18190, Jheh 1, CG7228, lama, disco, CG6664, Casein kinase II β subunit, CG9171, GstE1, cAMP-dependent protein kinase R2, CG15161, MESR3, Meics, Atpalpha, Calx, Rlip, nompC, H15, Lam, Glu-RIIA, Glu-RIIB, Ork1, Shaker and Hyperkinetic.

42. The method of claim 41, wherein the expression level or activity of one or more of CG18190 or Jheh1 is increased.

43. The method of claim 42, wherein the expression level or activity is increased by providing the gene product or an agonist small molecule to said subject.

44. The method of claim 43, wherein said gene product is provided to said subject multiple times over a defined period.

45. The method of claim 41, further comprising providing a stimulant to said subject.

46. The method of claim 41, wherein the expression level or activity of one or more of Ork1 is decreased.

47. The method of claim 46, wherein the expression level or activity is decreased by providing an antisense molecule, a ribozyme, an interfering RNA or an antagonist small molecule to said subject.

48. The method of claim 47, wherein said gene product is provided to said subject multiple times over a defined period.

49. The method of claim 41, wherein said subject suffers from a sleep disorder.

50. The method of claim 41, wherein said subject suffers from environmental sleep deprivation.

51. A method of increasing sleep in a subject comprising modulating the expression level or activity of a gene product selected from the group consisting of CG18190, Jheh 1, CG7228, lama, disco, CG6664, Casein kinase II β subunit, CG9171, GstE1, cAMP-dependent protein kinase R2, CG15161, MESR3, Meics, Atpalpha, Calx, Rlip, nompC, H15, Lam, Glu-RIIA, Glu-RIIB, Ork1, Shaker and Hyperkinetic.

52. The method of claim 51, wherein the expression level or activity of one or more of Ork1 is increased.

53. The method of claim 52, wherein the expression level or activity is increased by providing the gene product or an agonist small molecule to said subject.

54. The method of claim 53, wherein said gene product is provided to said subject multiple times over a defined period.

55. The method of claim 51, further comprising providing a sedative to said subject.

56. The method of claim 51, wherein the expression level or activity of one or more of CG18190 or Jheh1 is decreased.

57. The method of claim 56, wherein the expression level or activity is decreased by providing an antisense molecule, a ribozyme, an interfering RNA or an antagonist small molecule to said subject.

58. The method of claim 57, wherein said gene product is provided to said subject multiple times over a defined period.

59. The method of claim 51, wherein said subject suffers from a sleep disorder.

60. A method for identifying the basis of a sleep disorder in a subject comprising:
(a) obtaining mRNA from a neuronal cell of said subject; and
(b) measuring the expression level or activity of SEQ ID NO:2, 4, 6, 8, 10, 12, 14, 16, 18, 20, 22, 24, 26, 28-30, 32, 34, 36, 38, 40, 42, 44, 46, 48, 54 and/or 55.
whereby a change in the expression level or activity of a gene product in step (b), as compared to the expression level or activity of said gene product in a similar cell from a normal subject, identifies the basis of said sleep disorder.
